(19) United States
(12) Patent Application Publication
(10) Pub. No.: US 2019/0335726 A1
(43) Pub. Date: Nov. 7, 2019

(54) GENETICALLY MODIFIED CELLS, TISSUES, AND ORGANS FOR TREATING DISEASE

(71) Applicant: Regents of the University of Minnesota, Minneapolis, MN (US)

(72) Inventors: Bernhard J. Hering, Minnetonka, MN (US); Christopher Burlak, Minnetonka, MN (US)

(21) Appl. No.: 16/312,052

(22) PCT Filed: Jun. 14, 2017
(86) PCT No.: PCT/US2017/037566

§ 371 Date: Dec. 20, 2018

Related U.S. Application Data
(60) Provisional application No. 62/350,048, filed on Jun. 14, 2016.

(51) Int. Cl. A01K 67/027; C12N 15/85

(52) U.S. Cl. CPC A01K 67/0278; C12N 15/8509; A01K 2217/075; C12N 2015/8518; A01K 2227/106; A01K 2227/108; A01K 2267/025; A01K 2217/15

(57) ABSTRACT

Genetically modified cells, tissues, and organs for treating or preventing diseases are disclosed. Also disclosed are methods of making the genetically modified cells and non-human animals.

### CROSS-REFERENCE

[0001] This application claims the benefit of U.S. Provisional Application No. 62/350,048, filed Jun. 14, 2016, which application is incorporated herein by reference in its entirety.

### BACKGROUND OF THE DISCLOSURE

[0002] There is a shortage of organs, tissues or cells available for transplantation in recipients such as humans. Xenotransplantation or allotransplantation of organs, tissues, or cells into humans has the potential to fulfill this need and help hundreds of thousands of people every year. Non-human animals can be chosen as organ donors based on their anatomical and physiological similarities to humans. Additionally, xenotransplantation has implications not only in humans, but also in veterinary applications.

[0003] However, unmodified wild-type non-human animal tissues can be rejected by recipients, such as humans, by the immune system. Rejection is believed to be caused at least in part by antibodies binding to the tissues and cell-mediated immunity leading to graft loss. For example, pig grafts can be rejected by cellular mechanisms mediated by adaptive immune cells.

### INCORPORATION BY REFERENCE

[0004] All publications, patents, and patent applications herein are incorporated by reference to the same extent as if each individual publication, patent, or patent application was specifically and individually indicated to be incorporated by reference. In the event of a conflict between a term herein and a term in an incorporated reference, the term herein controls.

### SUMMARY

[0005] In a first aspect, disclosed herein are genetically modified non-human animals comprising an exogenous nucleic acid sequence at least 95% identical to SEQ ID NO: 359 or SEQ ID NO: 502.

[0006] In some embodiments of the first aspect, the exogenous nucleic acid is at least 96% identical to SEQ ID NO: 359 or SEQ ID NO: 502. In some embodiments, the exogenous nucleic acid is at least 97% identical to SEQ ID NO: 359 or SEQ ID NO: 502. In some embodiments, the exogenous nucleic acid is at least 98% identical to SEQ ID NO: 359 or SEQ ID NO: 502. In some embodiments, the exogenous nucleic acid is at least 99% identical to SEQ ID NO: 359 or SEQ ID NO: 502. In some embodiments, the exogenous nucleic acid is 100% identical to SEQ ID NO: 359 or SEQ ID NO: 502.

[0007] In a second aspect, disclosed herein are genetically modified non-human animals comprising an exogenous nucleic acid that is transcribed as a human leukocyte antigen G (HLA-G) mRNA with a modified 3′ untranslated region.

[0008] In some embodiments of the second aspect, the modified 3′ untranslated region comprises one or more deletions. In some embodiments, the modified 3′ untranslated region increases stability of the mRNA in comparison to an unmodified HLA-G mRNA. In some embodiments, the HLA-G is HLA-G1, HLA-G2, HLA-G3, HLA-G4, HLA-G5, HLA-G6, or HLA-G7. In some embodiments, the HLA-G is HLA-G1. In some embodiments, the HLA-G is HLA-G2.

[0009] In some embodiments of the first or second aspect, at least one cell of the genetically modified non-human animal expresses a HLA-G protein. In some embodiments, the HLA-G protein is HLA-G1.

[0010] Some embodiments of the first or second aspect further comprise a second exogenous nucleic acid that encodes for a β-2-microglobulin (B2M) protein. In some embodiments, the B2M protein is a human B2M protein.

[0011] In a third aspect, disclosed herein are genetically modified non-human animals comprising an exogenous nucleic acid sequence at least 75% identical to SEQ ID NO: 240.

[0012] In some embodiments of the third aspect, the exogenous nucleic acid sequence is at least 80% identical to SEQ ID NO: 240. In some embodiments, the exogenous nucleic acid sequence is at least 85% identical to SEQ ID NO: 240. In some embodiments, the exogenous nucleic acid sequence is at least 90% identical to SEQ ID NO: 240. In some embodiments, the exogenous nucleic acid sequence is at least 95% identical to SEQ ID NO: 240. In some embodiments, the exogenous nucleic acid sequence is identical to SEQ ID NO: 240.

[0013] In some embodiments of the third aspect, at least one cell of the genetically modified non-human animal expresses a human CD47 protein.

[0014] Some embodiments of the third aspect further comprise a second exogenous nucleic acid sequence that is transcribed as a human leukocyte antigen G (HLA-G) mRNA with a modified 3′ untranslated region. In some embodiments, the modified 3′ untranslated region comprises one or more deletions. In some embodiments, the modified 3′ untranslated region increases stability of the mRNA in comparison to an unmodified HLA-G mRNA. In some embodiments, the HLA-G is HLA-G1, HLA-G2, HLA-G3, HLA-G4, HLA-G5, HLA-G6, or HLA-G7. In some embodiments, the HLA-G is HLA-G1. In some embodiments, the HLA-G is HLA-G2.

[0015] In some embodiments of the third aspect, the second exogenous nucleic acid sequence is at least 95%, 96%, 97%, 98%, 99%, or 100% identical to SEQ ID NO: 359 or SEQ ID NO: 502.

[0016] In some embodiments of the first, second, or third aspects, the exogenous nucleic acid sequence is operatively linked to a constitutively active endogenous promoter.

[0017] In some embodiments of the first, second, or third aspects, the exogenous nucleic acid sequence is inserted in the genetically modified non-human animal's genome at a ROSA 26 gene site.

[0018] In some embodiments of the first, second, or third aspects, the exogenous nucleic acid sequence is inserted in the genetically modified non-human animal's genome at a site effective to reduce expression of a glycoprotein galactosyltransferase alpha 1,3 (GGTA1), a putative cytidine monophosphate-N-acetylneuraminic acid hydroxylase-like protein (CMAH), a β1,4 N-acetylgalactosaminyltransferase (B4GALNT2), a C—X—C motif chemokine 10 (CXCL10), a MHC class I polypeptide-related sequence A (MICA), a MHC class I polypeptide-related sequence B (MICB), a transporter associated with antigen processing 1 (TAP1), a NOD-like receptor family CARD domain containing 5 (NLRC5), or a combination thereof in comparison to: an animal of the same species without the exogenous nucleic acid sequence or an animal of the same species with the exogenous nucleic acid inserted in a different site.

[0019] In some embodiments of the first, second, or third aspects, the exogenous nucleic acid sequence is inserted in the genetically modified non-human animal's genome at the site effective to reduce expression of the glycoprotein galactosyltransferase alpha 1,3 (GGTA1).

[0020] In some embodiments of the first, second, or third aspects, the genetically modified non-human animal further comprises a genomic disruption in one or more genes selected from the list consisting of: a glycoprotein galactosyltransferase alpha 1,3 (GGTA1), a putative cytidine monophosphate-N-acetylneuraminic acid hydroxylase-like protein (CMAH), a β1,4 N-acetylgalactosaminyltransferase (B4GALNT2), a C—X—C motif chemokine 10 (CXCL10), a MHC class I polypeptide-related sequence A (MICA), a MHC class I polypeptide-related sequence B (MICB), a transporter associated with antigen processing 1 (TAP1), a NOD-like receptor family CARD domain containing 5 (NLRC5), and any combination thereof.

[0021] In some embodiments of the first, second, or third aspects, the genetically modified non-human animal further comprises a genomic disruption in one or more genes selected from the list consisting of: a component of an MHC I-specific enhanceosome, a transporter of an MHC I-binding peptide, a natural killer (NK) group 2D ligand, a CXC chemokine receptor (CXCR)3 ligand, MHC II transactivator (CIITA), C3, an endogenous gene not expressed in a human, and any combination thereof. Some embodiments comprise the genomic disruption of the component of a MHC I-specific enhanceosome, wherein the component of a MHC I-specific enhanceosome is NOD-like receptor family CARD domain containing 5 (NLRC5). Some embodiments comprise the genomic disruption of the transporter of a MHC I-binding peptide, wherein the transporter is transporter associated with antigen processing 1 (TAP1). Some embodiments comprise the genomic disruption of C3. Some embodiments comprise the genomic disruption of the NK group 2D ligand, wherein the NK group 2D ligand is MHC class I polypeptide-related sequence A (MICA) or MHC class I polypeptide-related sequence B (MICB). Some embodiments comprise the genomic disruption of the endogenous gene not expressed in a human, wherein the endogenous gene not expressed in a human is glycoprotein galactosyltransferase alpha 1,3 (GGTA1), putative cytidine monophosphate-N-acetylneuraminic acid hydroxylase-like protein (CMAH), or β1,4 N-acetylgalactosaminyltransferase (B4GALNT2). Some embodiments comprise the genomic disruption of the CXCR3 ligand, wherein the CXCR3 ligand is C—X—C motif chemokine 10 (CXCL10).

[0022] In some embodiments, the genomic disruption reduces expression of the disrupted gene in comparison to an animal of the same species without the genomic disruption.

[0023] In some embodiments, the the genomic disruption reduces protein expression from the disrupted gene in comparison to an animal of the same species without the genomic disruption.

[0024] Some embodiments of the first, second, or third aspect further comprise an additional exogenous nucleic acid sequence encoding an infected cell protein 47 (ICP47).

[0025] In some embodiments of the first, second, or third aspect, the genetically modified non-human animal is a member of the Laurasiatheria superorder.

[0026] In some embodiments of the first, second, or third aspect, the genetically modified non-human animal is an ungulate.

[0027] In some embodiments of the first, second, or third aspect, the genetically modified non-human animal is a pig.

[0028] In some embodiments of the first, second, or third aspect, the genetically modified non-human animal is a non-human primate.

[0029] In some embodiments of the first, second, or third aspect, the genetically modified non-human animal is fetus.

[0030] Also disclosed herein are cells isolated from the genetically modified non-human animal of any embodiments of the first, second, or third aspects. In some embodiments, the cell is an islet cell. In some embodiments, the cell is a stem cell.

[0031] Also disclosed herein are tissues isolated from the genetically modified non-human animal of any embodiments of the first, second, or third aspects. In some embodiments, the tissue is a solid organ transplant. In some embodiments, the tissue is all or a portion of a liver. In some embodiments, the tissue is all or a portion of a kidney.

[0032] In a fourth aspect, disclosed herein are non-human cells comprising an exogenous nucleic acid sequence at least 95% identical to SEQ ID NO: 359 or SEQ ID NO: 502.

[0033] In some embodiments of the fourth aspect, the exogenous nucleic acid is at least 96% identical to SEQ ID NO: 359 or SEQ ID NO: 502. In some embodiments, the exogenous nucleic acid is at least 97% identical to SEQ ID NO: 359 or SEQ ID NO: 502. In some embodiments, the exogenous nucleic acid is at least 98% identical to SEQ ID NO: 359 or SEQ ID NO: 502. In some embodiments, the exogenous nucleic acid is at least 90% identical to SEQ ID NO: 359 or SEQ ID NO: 502. In some embodiments, the exogenous nucleic acid is 100% identical to SEQ ID NO: 359 or SEQ ID NO: 502.

[0034] In some embodiments of the fourth aspect, the non-human cell expresses human leukocyte antigen G1 (HLA-G1) on the cell surface.

[0035] In a fifth aspect, disclosed herein are non-human cells comprising an exogenous nucleic acid that is transcribed as a human leukocyte antigen G (HLA-G) mRNA with a modified 3′ untranslated region.

[0036] In some embodiments of the fifth aspect, the modified 3′ untranslated region comprises one or more deletions. In some embodiments, the modified 3′ untranslated region increases stability of the mRNA in comparison to an unmodified HLA-G mRNA.

[0037] In some embodiments of the fifth aspect, the HLA-G is HLA-G1, HLA-G2, HLA-G3, HLA-G4, HLA-G5, HLA-G6, or HLA-G7. In some embodiments, the HLA-G is HLA-G1. In some embodiments, the HLA-G is HLA-G2.

[0038] In some embodiments of the fourth or fifth aspect, the non-human cell further comprises a second exogenous nucleic acid that encodes for a β-2-microglobulin (B2M) protein. In some embodiments, the B2M protein is a human B2M protein.

[0039] In a sixth aspect, disclosed herein are non-human cells comprising an exogenous nucleic acid at least 75% identical to SEQ ID NO: 240.

[0040] In some embodiments of the sixth aspect, the exogenous nucleic acid sequence is at least 80% identical to SEQ ID NO: 240.

[0041] In some embodiments, the exogenous nucleic acid sequence is at least 85% identical to SEQ ID NO: 240. In some embodiments, the exogenous nucleic acid sequence is at least 90% identical to SEQ ID NO: 240. In some embodiments, the exogenous nucleic acid sequence is at least 95% identical to SEQ ID NO: 240. In some embodiments, the exogenous nucleic acid sequence is 100% identical to SEQ ID NO: 240.

[0042] In some embodiments of the sixth aspect, the at least one non-human cell expresses a human CD47 protein.

[0043] In some embodiments of the sixth aspect, the non-human cell further comprises a second exogenous nucleic acid sequence that is transcribed as a human leukocyte antigen G (HLA-G) mRNA with a modified 3′ untranslated region. In some embodiments, the modified 3′ untranslated region comprises one or more deletions. In some embodiments, the modified 3′ untranslated region increases stability of the mRNA in comparison to an unmodified HLA-G mRNA. In some embodiments, the HLA-G is HLA-G1, HLA-G2, HLA-G3, HLA-G4, HLA-G5, HLA-G6, or HLA-G7. In some embodiments, the HLA-G is HLA-G1. In some embodiments, the HLA-G is HLA-G2. In some embodiments, the second exogenous nucleic acid sequence is at least 95%, 96%, 97%, 98%, 99%, or 100% identical to SEQ ID NO: 359 or SEQ ID NO: 502.

[0044] In some embodiments of the fourth, fifth, or sixth aspects, the exogenous nucleic acid sequence is operatively linked to a constitutively active endogenous promoter.

[0045] In some embodiments of the fourth, fifth, or sixth aspects, the exogenous nucleic acid sequence is inserted in the non-human cell's genome at a ROSA 26 gene site.

[0046] In some embodiments of the fourth, fifth, or sixth aspects, the exogenous nucleic acid sequence is inserted in the non-human cell's genome at a site effective to reduce expression of a glycoprotein galactosyltransferase alpha 1,3 (GGTA1), a putative cytidine monophosphate-N-acetylneuraminic acid hydroxylase-like protein (CMAH), a β1,4 N-acetylgalactosaminyltransferase (B4GALNT2), a C—X—C motif chemokine 10 (CXCL10), a MHC class I polypeptide-related sequence A (MICA), a MHC class I polypeptide-related sequence B (MICB), a transporter associated with antigen processing 1 (TAP1), a NOD-like receptor family CARD domain containing 5 (NLRC5), or a combination thereof in comparison to: a cell of the same species without the exogenous nucleic acid sequence or a cell of the same species wherein the exogenous nucleic acid is inserted in a different site.

[0047] In some embodiments of the fourth, fifth, or sixth aspects, the exogenous nucleic acid sequence is inserted in the non-human cell's genome at a site that reduces expression of a glycoprotein galactosyltransferase alpha 1,3 (GGTA1).

[0048] In some embodiments of the fourth, fifth, or sixth aspects, the non-human cell further comprises a genomic disruption in one or more genes selected from the list consisting of: a glycoprotein galactosyltransferase alpha 1,3 (GGTA1), a putative cytidine monophosphate-N-acetylneuraminic acid hydroxylase-like protein (CMAH), a β1,4 N-acetylgalactosaminyltransferase (B4GALNT2), a C—X—C motif chemokine 10 (CXCL10), a MHC class I polypeptide-related sequence A (MICA), a MHC class I polypeptide-related sequence B (MICB), a transporter associated with antigen processing 1 (TAP1), a NOD-like receptor family CARD domain containing 5 (NLRC5), and any combination thereof.

[0049] In some embodiments of the fourth, fifth, or sixth aspects, the non-human cell further comprises a genomic disruption in one or more genes selected from the list consisting of: a component of an MHC I-specific enhanceosome, a transporter of an MHC I-binding peptide, a natural killer (NK) group 2D ligand, a CXC chemokine receptor (CXCR)3 ligand, MHC II transactivator (CIITA), C3, an endogenous gene not expressed in a human, and any combination thereof. In some embodiments, the non-human cell comprises the genomic disruption of the component of a MHC I-specific enhanceosome, wherein the component of a MHC I-specific enhanceosome is NOD-like receptor family CARD domain containing 5 (NLRC5). In some embodiments, the non-human cell comprises the genomic disruption of the transporter of a MHC I-binding peptide, wherein the transporter is transporter associated with antigen processing 1 (TAP1)

[0050] In some embodiments, the non-human cell comprises the genomic disruption of C3.

[0051] In some embodiments, the non-human cell comprises the genomic disruption of the NK group 2D ligand, wherein the NK group 2D ligand is MHC class I polypeptide-related sequence A (MICA) or MHC class I polypeptide-related sequence B (MICB).

[0052] In some embodiments, the non-human cell comprises the genomic disruption of the endogenous gene not expressed in a human, wherein the endogenous gene not expressed in a human is glycoprotein galactosyltransferase alpha 1,3 (GGTA1), putative cytidine monophosphate-N-acetylneuraminic acid hydroxylase-like protein (CMAH), or β1,4 N-acetylgalactosaminyltransferase (B4GALNT2). In some embodiments, the non-human cell comprises the genomic disruption of a CXCR3 ligand, wherein the CXCR3 ligand is C—X—C motif chemokine 10 (CXCL10). In some embodiments, the genomic disruption reduces expression of the disrupted gene in comparison to a cell from the same species without the genomic disruption.

[0053] In some embodiments, the genomic disruption reduces protein expression from the disrupted gene in comparison to a cell from the same species without the genomic disruption.

[0054] Some embodiments of the fourth, fifth, or sixth aspects further comprise an additional exogenous nucleic acid sequence encoding an infected cell protein 47 (ICP47).

[0055] In some embodiments of the fourth, fifth, or sixth aspects, the non-human cell is a Laurasiatheria superorder cell.

[0056] In some embodiments of the fourth, fifth, or sixth aspects, the non-human cell is an ungulate cell.

[0057] In some embodiments of the fourth, fifth, or sixth aspects, the non-human cell is a pig cell.

[0058] In some embodiments of the fourth, fifth, or sixth aspects, the non-human cell is a non-human primate cell.

[0059] In some embodiments of the fourth, fifth, or sixth aspects, the non-human cell is a fetal cell.

[0060] In some embodiments of the fourth, fifth, or sixth aspects, the non-human cell is a stem cell.

[0061] In some embodiments of the fourth, fifth, or sixth aspects, the non-human cell is an islet cell.

[0062] Also disclosed herein are solid organ transplants comprising the non-human cell of any embodiment of the fourth, fifth, or sixth aspects.

[0063] Also disclosed herein are embryos comprising the non-human cell of any embodiment of the fourth, fifth, or sixth aspects.

[0064] In a seventh aspect, disclosed herein are methods comprising providing to a subject, at least one non-human cell of any embodiment of the fourth, fifth, or sixth aspects. In some embodiments, the at least one non-human cell is a solid organ transplant. In some embodiments, the at least one non-human cell is a stem cell transplant. In some embodiments, the at least one non-human cell is an islet cell transplant.

[0065] Some embodiments of the seventh aspect comprise providing to the subject a tolerizing vaccine. In some embodiments, the tolerizing vaccine is provided prior to, concurrently with, or after the at least one non-human cell is provided to the subject. In some embodiments, the tolerizing vaccine comprises apoptotic cells. In some embodiments, the tolerizing vaccine comprises cells from the same species as the at least one non-human cell provided to the subject. In some embodiments, the tolerizing vaccine comprises cells that are genetically identical to the at least one non-human cell provided to the subject.

[0066] Some embodiments of the seventh aspect comprise providing an anti-CD40 antibody to the subject. In some embodiments, the anti-CD40 antibody is provided prior to, concurrently with, or after the at least one non-human cell is provided to the subject. In some embodiments, the anti-CD40 antibody specifically binds to an epitope within amino acid sequence SEQ ID NO: 487. In some embodiments, the anti-CD40 antibody specifically binds to an epitope within amino acid sequence SEQ ID NO: 488.

[0067] In an eight aspect, disclosed herein are systems for xenotransplantation comprising: a) at least one cell isolated from the genetically modified non-human animal of any embodiment of the first, second or third aspects; and b) a tolerizing vaccine, anti-CD40 antibody, or a combination thereof. In some embodiments, the at least one cell comprises an islet cell, a stem cell, or a combination thereof. In some embodiments, the at least one cell is a solid organ transplant. In some embodiments, the at least one cell is all or a portion of a liver. In some embodiments, the at least one cell is all or a portion of a kidney.

[0068] Some embodiments of the eighth aspect comprise the tolerizing vaccine. In some embodiments, the tolerizing vaccine comprises apoptotic cells. In some embodiments, the tolerizing vaccine comprises cells from the same species as the at least one cell. In some embodiments, the tolerizing vaccine comprises cells that are genetically identical to the at least one cell.

[0069] Some embodiments of the eighth aspect comprise or further comprise the anti-CD40 antibody. In some embodiments, the anti-CD40 antibody specifically binds to an epitope within amino acid sequence SEQ ID NO: 487. In some embodiments, the anti-CD40 antibody specifically binds to an epitope within amino acid sequence SEQ ID NO: 488.

[0070] In a ninth aspect, disclosed herein are systems for xenotransplantation comprising: a) at least one non-human cell of any one of claims 58-108; and b) a tolerizing vaccine, an anti-CD40 antibody, or a combination thereof. In some embodiments, the at least one cell comprises an islet cell, a stem cell, or a combination thereof. In some embodiments, the at least one cell is a solid organ transplant. In some embodiments, the at least one cell is all or a portion of a liver. In some embodiments, the at least one cell is all or a portion of a kidney.

[0071] Some embodiments of the ninth aspect comprise the tolerizing vaccine. In some embodiments, the tolerizing vaccine comprises apoptotic cells. In some embodiments, the tolerizing vaccine comprises cells from the same species as the at least one cell. In some embodiments, the tolerizing vaccine comprises cells that are genetically identical to the at least one cell.

[0072] Some embodiments of the ninth aspect comprise or further comprise the anti-CD40 antibody. In some embodiments, the anti-CD40 antibody specifically binds to an epitope within amino acid sequence SEQ ID NO: 487. In some embodiments, the anti-CD40 antibody specifically binds to an epitope within amino acid sequence SEQ ID NO: 488.

[0073] Provided herein are methods comprising providing to an individual at least one engineered cell; wherein said engineered cell comprises at least two genomic modification resulting in inhibition of the immune response of said individual to said at least one engineered cell as measured by reduced effector function of at least one endogenous cell selected from a group consisting of T cells, B cells, monocytes, macrophages, Natural Killer (NK) cells, dendritic cells, and a combination thereof; and/or by increased immune cell regulation of at least one endogenous cell selected from a group including but not limited to CD4+ regulatory T cells, CD8+ regulatory T cells, CD8+ natural suppressor cells, Tr1 cells, regulatory B cells, B10 cells, myeloid-derived suppressor cells, and any combination thereof, as compared to an immune response of an individual contacted with a non-engineered counterpart cell. In some cases, the at least one engineered cell can be a solid organ transplant. In other cases, at least one engineered cell can be a stem cell transplant. In some cases, at least one engineered cell can be an islet cell transplant. An individual can be tolerized to an at least one engineered cell. In some cases, tolerization can occur before, during or, after an at least one engineered cell can be provided to an individual.

[0074] In some cases, tolerization can be facilitated by an administration of a vaccine. In some cases, tolerization can be an administration of at least one engineered cell. In some cases, tolerization can be an administration of a vaccine and administration of at least one engineered cell. A vaccine can comprise apoptotic cells. A vaccine can also comprise viable cells. In some cases, reduced effector function can be selected from a group consisting of reduced proliferation; reduced cytokine expression, reduced expression of cytolytic effector molecules, reduced persistence, deletion, induction of anergy, increased immune cell regulation, and any combination thereof in response to exposure to said at least one engineered cell.

[0075] Disclosed herein can also be administering to an individual at least one additional treatment step. In some cases, at least one additional treatment step can be an immunosuppressive therapy. An immunosuppressive therapy can be selected from a group consisting of an anti-CD40 antibody, an anti-CD20 antibody, an anti-IL6 receptor antibody, C₅₁H₇₉NO₁₃ (Rapamycin), soluble tumor necrosis factor receptor (sTNFR), C₆₆H₉₉N₂₃O₁₇S₂ (compstatin), and any combination thereof. An individual may not be sensitized to a major histocompatibility complex (MHC). The anti-CD40 antibody can be an antagonistic antibody. The anti-CD40 antibody can be an anti-CD40 antibody that specifically binds to an epitope within the amino acid sequence: EPPTACREKQYLINSQCCSLCQPGQKLVSDCTEFTETECLPCGESEFLDTWNRETHCHQH KYCDPNLGLRVQQKGTSETDTICTCEEGWHCTSEACESCV (SEQ ID NO: 487). The anti-CD40 antibody can be an anti-CD40 antibody that specifically binds to an epitope within the amino acid sequence: EKQYLINSQCCSLCQPGQKLVSDCTEFTETECL (SEQ ID NO: 488). The anti-CD40 antibody can be a Fab′ anti-CD40L monoclonal antibody fragment CDP7657. The anti-CD-40 antibody can be a FcR-engineered, Fc silent anti-CD40L monoclonal domain antibody. In some cases, an individual can be sensitized to a major histocompatibility complex (MHC). MHC can be human leukocyte antigen (HLA). An individual can be sensitized to a major histocompatibility complex (MHC) as determined by a positive response to a panel reactive antibody (PRA) screen analysis.

[0076] In some cases, an individual can have a calculated panel reactive antibody (cPRA) score from 0.1 to 100%. In some cases, a reduced effector function can be a reduced effector function of at least two endogenous cell types selected from a group consisting of T cells, B cells, monocytes, macrophages, Natural Killer (NK) cells, dendritic cells, and any combination thereof. A genome modification can be a gene disruption, deletion, induction of anergy, increased immune cell regulation, or a combination thereof. A gene can be selected from a group consisting of a C—X—C motif chemokine 10 (CXCL10), transporter associated with antigen processing 1 (TAP1), NOD-like receptor family CARD domain containing 5 (NLRC5), and any combination thereof. In some cases, an at least one engineered cell is a xenograft.

[0077] Disclosed herein can be an engineered polynucleic acid comprising at least two sequences encoding targeting oligonucleotides; wherein said targeting oligonucleotides comprise complementary sequences to at least one non-human genome sequence adjacent to a protospacer adjacent motif (PAM) sequence. In some cases, targeting oligonucleotides can be guide RNAs (gRNAs). A gRNA can comprise complementary sequences to a gene selected from a group consisting of GGTA1, Gal2-2, NLRC5, and any combination thereof. In some cases, gRNAs can comprise complementary sequences to GGTA1 and/or Gal2. A gRNA can comprise complementary sequences to NLRC5 and Gal2. In some cases, a targeting oligonucleotide can bind a first exon of said gene. A non-human genome can be a Laurasiatheria superorder animal or can be from a non-human primate. A Laurasiatheria super order animal can be an ungulate. In some cases, an ungulate can be a pig. A PAM sequence can be 5′-NGG-3′ (SEQ ID NO: 265).

[0078] In some cases, a guide RNA can comprise at least one modification. A modification can be selected from a group consisting of 5′adenylate, 5′ guanosine-triphosphate cap, 5′N⁷-Methylguanosine-triphosphate cap, 5′triphosphate cap, 3′phosphate, 3′thiophosphate, 5′phosphate, 5′thiophosphate, Cis-Syn thymidine dimer, trimers, C12 spacer, C3 spacer, C6 spacer, dSpacer, PC spacer, rSpacer, Spacer 18, Spacer 9,3′-3′ modifications, 5′-5′ modifications, abasic, acridine, azobenzene, biotin, biotin BB, biotin TEG, cholesteryl TEG, desthiobiotin TEG, DNP TEG, DNP-X, DOTA, dT-Biotin, dual biotin, PC biotin, psoralen C2, psoralen C6, TINA, 3′DABCYL, black hole quencher 1, black hole quencer 2, DABCYL SE, dT-DABCYL, IRDye QC-1, QSY-21, QSY-35, QSY-7, QSY-9, carboxyl linker, thiol linkers, 2′deoxyribonucleoside analog purine, 2′deoxyribonucleoside analog pyrimidine, ribonucleoside analog, 2′-0-methyl ribonucleoside analog, sugar modified analogs, wobble/universal bases, fluorescent dye label, 2′fluoro RNA, 2′O-methyl RNA, methylphosphonate, phosphodiester DNA, phosphodiester RNA, phosphothioate DNA, phosphorothioate RNA, UNA, pseudouridine-5′-triphosphate, 5-methylcytidine-5′-triphosphate, and any combination thereof.

[0079] Disclosed herein can be a graft for xenotransplantation comprising at least one genomic disruption of SEQ ID NO: 261.

[0080] Disclosed herein can be a graft for xenotransplantation comprising at least one genomic disruption of SEQ ID NO: 262.

[0081] In some cases, a graft for xenotransplantation can further comprise at least one transgene. A transgene can be endogenous. A transgene can be engineered. A transgene can encode a human leukocyte antigen (HLA). An HLA can be HLA-G. A transgene can be CD47.

[0082] Provided herein is a genetically modified animal having a genomic disruption in two or more genes selected from a group consisting of: a component of an MHC I-specific enhanceosome, a transporter of an MHC I-binding peptide, a natural killer (NK) group 2D ligand, a CXC chemokine receptor (CXCR)3 ligand, MHC II transactivator (CIITA), C3, an endogenous gene not expressed in a human, and any combination thereof, wherein said genetically modified animal has reduced expression of said gene in comparison to a non-genetically modified counterpart animal. In some cases, a genetically modified animal can be a member of the Laurasiatheria superorder, wherein said member of the Laurasiatheria super order is an ungulate. An ungulate can be a pig.

[0083] In some cases, protein expression of said two or more genes can be absent in a genetically modified animal. In some cases, reduction of protein expression inactivates a function of said two or more genes. In some cases, a genetically modified animal can have reduced protein expression of three or more genes. A genetically modified animal can have reduced protein expression of a component of a MHC I-specific enhanceosome, wherein a component of a MHC I-specific enhanceosome can be a NOD-like receptor family CARD domain containing 5 (NLRC5). A genetically modified animal can comprise reduced protein expression of a transporter of a MHC I-binding peptide, wherein a transporter can be a transporter associated with antigen processing 1 (TAP1).

[0084] In some cases, a genetically modified animal can comprise reduced protein expression of C3. In some cases, a reduction of protein expression can inactivate a function of two or more genes. In some cases, a reduced protein expression of a NK group 2D ligand can be an MHC class I polypeptide-related sequence A (MICA) or MHC class I polypeptide-related sequence B (MICB). In some cases, reduced protein expression of an endogenous gene may not be expressed in a human, wherein said endogenous gene may not be expressed in a human can be glycoprotein galactosyltransferase alpha 1,3 (GGTA1), putative cytidine monophosphate-N-acetylneuraminic acid hydroxylase-like protein (CMAH), or β1,4 N-acetylgalactosaminyltransferase (B4GALNT2).

[0085] In some genetically modified animals described herein, is at least two genomic disruptions resulting in a reduced protein expression of a CXCR3 ligand, which can be C—X—C motif chemokine 10 (CXCL 10).

[0086] Provided herein is at least one genetically modified animal further comprising one or more exogenous transgenes encoding at least one protein or functional fragment thereof, wherein said at least one protein is selected from an MHC I formation suppressor, a regulator of complement activation, an inhibitory ligand for NK cells, a B7 family member, CD47, a serine protease inhibitor, galectin, and any combination thereof.

[0087] In some cases, the at least one protein can be at least one human protein. One or more exogenous transgenes encoding an MHC I formation suppressor can be infected cell protein 47 (ICP47). In some cases, one or more exogenous transgenes encoding a regulator of complement activation can be cluster of differentiation 46 (CD46), cluster of differentiation 55 (CD55), or cluster of differentiation 59 (CD59). In some cases, one or more exogenous transgenes encoding an inhibitory ligand for NK cells can be leukocyte antigen E (HLA-E), human leukocyte antigen G (HLA-G), or β-2-microglobulin (B2M). In other cases, one or more exogenous transgenes encoding HLA-G, wherein HLA-G can be HLA-G1, HLA-G2, HLA-G3, HLA-G4, HLA-G5, HLA-G6, or HLA-G7. In some cases, HLA-G can be HLA-G1.

[0088] In some genetically modified animal provided herein, are provided one or more exogenous transgenes encoding a B7 family member, wherein a B7 family member can be a programmed death-ligand. A programmed death-ligand can be programmed death-ligand 1 (PD-L1) or programmed death-ligand 2 (PD-L2). In some cases, one or more exogenous transgenes can encode both PD-L1 and PD-L2. In some cases, one or more exogenous transgenes can encode a serine protease inhibitor, wherein the serine protease inhibitor can be serine protease inhibitor 9 (Spi9). In some cases, one or more exogenous transgenes can encode a galectin, wherein the galectin can be galectin-9. In some cases, one or more exogenous transgenes can be inserted adjacent to a ubiquitous promoter. A ubiquitous promoter can be a Rosa26 promoter.

[0089] In some cases, one or more exogenous transgenes can be inserted adjacent to a promoter of a targeted gene, within said targeted gene, or adjacent to a protospacer adjacent motif (PAM) sequence. In some cases, protein expression of two or more genes can be reduced using a CRISPR/Cas system.

[0090] Provided herein is a genetically modified animal having a genomic disruption in at least one gene selected from a group consisting of a component of an MHC I-specific enhanceosome, a transporter of an MHC I-binding peptide, a natural killer (NK) group 2D ligand, a CXC chemokine receptor (CXCR) 3 ligand, MHC II transactivator (CIITA), C3, an endogenous gene not expressed in a human, and any combination thereof, wherein said genetically modified animal has reduced expression of said gene in comparison to a non-genetically modified counterpart animal and said genetically modified animal survives at least 22 days after birth. In some cases, a genetically modified animal can survive at least 23 days, 30 days, 35 days, 50 days, 70 days, 100 days, 150 days, 200 days, 250 days, 300 days, 350 days or 400 days after birth.

### BRIEF DESCRIPTION OF THE DRAWINGS

[0091] The novel features of the invention are set forth with particularity in the appended claims. A better understanding of the features and advantages of the present invention will be obtained by reference to the following detailed description that sets forth illustrative embodiments, in which the principles of the invention are utilized, and the accompanying drawings of which:

[0092] FIG. 1 demonstrates an immunotherapeutic strategy centered on the use of genetically modified cell and organ grafts lacking functional expression of MHC class I. The need for maintenance immunosuppression required for the prevention of graft rejection is progressively reduced (or the applicability of transplantation of cell and organ xenografts and the transplantation of stem cell-derived cellular allografts and xenografts is progressively increased) when the transplantation of genetically modified cells and organs is combined with transient use of antagonistic anti-CD40 antibodies and even more when combined with the administration of tolerizing vaccines comprising apoptotic donor cells under the cover of anti-CD40 antibodies.

[0093] FIG. 2 demonstrates one strategy of making genetically modified pig islet cells and tolerizing vaccines. Two clonal populations of pigs are created. One population having at least GGTA1 knocked out can be used to create a tolerizing vaccine. The other clonal population of pigs that have at least GGTA1 and MHC I genes (e.g., NRLC5) knocked out can be used for cell, tissues, and/or organ donors.

[0094] FIG. 3 demonstrates use of positive and tolerizing vaccines (also referred to as a negative vaccine).

[0095] FIG. 4 demonstrates an exemplary approach to extending the survival of xenografts in a subject with infusion of apoptotic donor splenocytes for tolerizing vaccination under the cover of transient immunosuppression.

[0096] FIG. 5 shows an exemplary approach to preventing rejection or extending survival of xenografts in a recipient in the absence of chronic and generalized immunosuppression of the xenograft recipient. This exemplary approach includes and integrates three components: i) genetically engineered islets with deficient and/or reduced expression of αGal, MHC class I, complement C3, and CXCL10 and transgenic expression of HLA-G; ii) genetically engineered donor apoptotic and non-apoptotic mononuclear cells (e.g., splenocytes) with deficient and/or reduced expression of αGal, Neu5Gc, and Sda/CAD as well as transgenic expression of HLA-G with or without human CD47, human PD-L1, human PD-L2 (e.g., the genetically engineered vaccine); and iii) the administration of transient immunosuppression including antagonistic anti-CD40 mAb, anti-CD20 mAb, rapamycin, and transient anti-inflammatory therapy including compstatin (e.g., the compstatin derivative APL-2), anti-IL-6 receptor mAb, and soluble TNF receptor.

[0097] FIG. 6 demonstrates an exemplary protocol for transplant rejection prophylaxis in a pig-to-cynomolgus monkey islet xenotransplantation. IE: islet equivalent; sTNFR: soluble TNF receptor (e.g., etanercept); α-IL-6R: anti-interleukin 6 receptor; Tx′d: transplanted.

[0098] FIGS. 7A-7E demonstrate a strategy for cloning a px330-Gal2-1 plasmid targeting GGTA1. FIG. 7A shows a cloning strategy and oligonucleotides (SEQ ID NOs: 266-267, respectively, in order of appearance) for making a guide RNA targeting GGTA1. FIG. 7B shows an insertion site on the px330 plasmid (SEQ ID NO: 268). FIG. 7C shows a flow chart demonstrating the cloning and verification strategy. FIG. 7D shows a cloning site (SEQ ID NO: 270) and sequencing primers (SEQ ID NOs: 269 and 271, respectively, in order of appearance). FIG. 7E shows sequencing results (SEQ ID NOs: 272-274 respectively, in order of appearance).

[0099] FIGS. 8A-8E demonstrate a strategy for cloning a px330-CM1F plasmid targeting CMAH. FIG. 8A shows a cloning strategy and oligonucleotides (SEQ ID NOs: 275 and 276, respectively, in order of appearance) for making a guide RNA targeting CMAH1. FIG. 8B shows an insertion site on the px330 plasmid (SEQ ID NO: 277). FIG. 8C shows a flow chart demonstrating the cloning and verification strategy. FIG. 8D shows a cloning site (SEQ ID NO: 279) and sequencing primers (SEQ ID NOs: 278 and 280, respectively, in order of appearance). FIG. 8E shows sequencing results (SEQ ID NOs: 281-283, respectively, in order of appearance).

[0100] FIGS. 9A-9E demonstrate a strategy for cloning a px330-NL1 FIRST plasmid targeting NLRC5. FIG. 9A shows a cloning strategy and oligonucleotides (SEQ ID NOs: 284 and 285, respectively, in order of appearance) for making a guide RNA targeting NLRC5. FIG. 9B shows an insertion site on the px330 plasmid (SEQ ID NO: 286). FIG. 9C shows a flow chart demonstrating the cloning and verification strategy. FIG. 9D shows a cloning site (SEQ ID NO: 288) and sequencing primers (SEQ ID NOs: 287 and 289, respectively, in order of appearance). FIG. 9E shows sequencing results (SEQ ID NOs: 290-292, respectively, in order of appearance).

[0101] FIGS. 10A-10E demonstrate a strategy for cloning a px330/C3-5 plasmid targeting C3. FIG. 10A shows a cloning strategy and oligonucleotides (SEQ ID NOs: 293 and 294, respectively, in order of appearance) for making a guide RNA targeting C3. FIG. 10B shows an insertion site on the px330 plasmid (SEQ ID NO: 295). FIG. 10C shows a flow chart demonstrating the cloning and verification strategy. FIG. 10D shows a cloning site (SEQ ID NO: 297) and sequencing primers (SEQ ID NOs: 296 and 298, respectively, in order of appearance). FIG. 10E shows sequencing results (SEQ ID NOs: 299-301, respectively, in order of appearance).

[0102] FIGS. 11A-11E demonstrate a strategy for cloning a px330/B41_second plasmid targeting B4GALNT2. FIG. 11A shows a cloning strategy and oligonucleotides (SEQ ID NOs: 302 and 303, respectively, in order of appearance) for making a guide RNA targeting B4GALNT2. FIG. 11B shows an insertion site on the px330 plasmid (SEQ ID NO: 304). FIG. 11C shows a flow chart demonstrating the cloning and verification strategy. FIG. 11D shows a cloning site (SEQ ID NO: 306) and sequencing primers (SEQ ID NOs: 305 and 307, respectively, in order of appearance). FIG. 11E shows sequencing results (SEQ ID NOs: 308-310, respectively, in order of appearance).

[0103] FIG. 12 demonstrates a map of Rosa26 locus sequenced in Example 2.

[0104] FIGS. 13A-13E demonstrates a strategy for cloning a px330/Rosa exon 1 plasmid targeting Rosa26. FIG. 13A shows a cloning strategy and oligonucleotides (SEQ ID NOs: 311-312, respectively, in order of appearance) for making a guide RNA targeting Rosa26. FIG. 13B shows an insertion site on the px330 plasmid (SEQ ID NO: 313). FIG. 13C shows a flow chart demonstrating the cloning and verification strategy. FIG. 13D shows a cloning site (SEQ ID NO: 315) and sequencing primers (SEQ ID NOs: 314 and 316, respectively, in order of appearance). FIG. 13E shows sequencing results (SEQ ID NOs: 317-319, respectively, in order of appearance).

[0105] FIG. 14A shows a map of the genomic sequence of HLA-G. FIG. 14B shows a map of the cDNA sequence of HLA-G.

[0106] FIG. 15 shows an exemplary microscopic view of porcine fetal fibroblasts transfected with pSpCas9(BB)-2A-GFP.

[0107] FIG. 16 shows a fluorescence in situ hybridization (FISH) to the GGTA1 gene by specific probes revealing the location on chromosome 1.

[0108] FIGS. 17A-17B demonstrate an example of phenotypic selection of cells with cas9/sgRNA-mediated GGTA1/NLCR5 disruption. FIG. 17A shows genetically modified cells, which do not express alpha-galactosidase. FIG. 17B shows non-genetically modified cells, which express alpha-galactosidase and were labeled with isolectin B4 (IB)-linked ferrous beads.

[0109] FIGS. 18A-18B show sequencing of DNA isolated from fetal cells of two separate litters (Pregnancy 1: FIG. 18A or Pregnancy 2: FIG. 18B) subjected to PCR amplification of the GGTA1 (compared to Sus scrofa breed mixed chromosome 1, Sscrofa10.2 NCBI Reference Sequence: NC_010443.4) target regions and the resulting amplicons were separated on 1% agarose gels. Amplicons were also analyzed by Sanger sequencing using the forward primer alone from each reaction. In FIG. 18A, the results are shown, aligned to reference and target gene sequences (SEQ ID NOs: 320-321, respectively), for fetuses 1-7 (SEQ ID NOs: 322-328, respectively) from Pregnancy 1's fetuses. Fetuses 1, 2, 4, 5, 6, and 7, were truncated 6 nucleotides after the target site for GGTA1. Fetus 3 was truncated 17 nucleotides after the cut site followed by a 2,511 (668-3179) nucleotide deletion followed by a single base substitution. Truncation, deletion and substitution from a single sequencing experiment containing the alleles from both copies of the target gene can only suggest a gene modification has occurred but not reveal the exact sequence for each allele. From this analysis it appears that all 7 fetuses have a single allele modification for GGTA1. In FIG. 18B, the results are shown, aligned to reference and target gene sequences (SEQ ID NOs: 329-330, respectively), for fetuses 1-5 (SEQ ID NOs: 331-335, respectively) from pregnancy 2 fetal DNA samples. Fetuses 1, 3, 4, and 5 were truncated 3 nucleotides from the GGTA1 gene target site. Fetus 2 had variability in Sanger sequencing that suggests a complex variability in DNA mutations or poor sample quality. However, fetal DNA template quality was sufficient for the generation of the GGTA1 gene screening experiment described above.

[0110] FIGS. 19A-19B show sequencing of DNA isolated from fetal cells of two separate litters (Pregnancy 1: FIG. 19A or Pregnancy 2: FIG. 19B) subjected to PCR amplification of the NLRC5 (consensus sequence) target regions and the resulting amplicons were separated on 1% agarose gels. Amplicons were also analyzed by Sanger sequencing using the forward primer alone from each reaction. In FIG. 19A, the results are shown, aligned to reference and target gene sequences (SEQ ID NOs: 336-337, respectively) for fetuses 1, 3, 5, 6, and 7 (SEQ ID NOs: 338-342, respectively) from Pregnancy 1. Sequence analysis of the NLRC5 target site was unable to show consistent alignment suggesting an unknown complication in the sequencing reaction or varying DNA modifications between NLRC5 alleles that complicate the Sanger sequencing reaction and analysis. In FIG. 19B, the results are shown, aligned to reference and target gene sequences (SEQ ID NOs: 343-344, respectively) for fetuses 1-5 (SEQ ID NOs: 345-349, respectively) from Pregnancy 2. NLRC5 gene amplicons for fetuses 1-5 were all truncated 120 nucleotides downstream of the NLRC5 gene cut site.

[0111] FIGS. 20A-20B show data from fetal DNA (wt and 1-7 (FIG. 20A: Pregnancy 1) or 1-5 (FIG. 20B: Pregnancy 2) isolated from hind limb biopsies. Target genes were amplified by PCR and PCR products were separated on 1% agarose gels and visualized by fluorescent DNA stain. The amplicon band present in the wt lanes represent the unmodified DNA sequence. An increase or decrease in size of the amplicon suggests an insertion or deletion within the amplicon, respectively. Variation in the DNA modification between alleles in one sample may make the band appear more diffuse. Pregnancy 1 (FIG. 20A) resulted in 7 fetuses while pregnancy 2 (FIG. 20B) resulted in 5 fetuses harvested at 45 and 43 days, respectively. A lack of band as in the NLRC5 gel in fetuses 1, 3, and 4 of FIG. 20A (bottom gel), suggests that the modification to the target region have disrupted the binding of DNA amplification primers. The presence of all bands in GGTA 1 in FIG. 20A (top gel) suggests that DNA quality was sufficient to generate DNA amplicons in the NLRC5 targeting PCR reactions. Fetuses 1, 2, 4, and 5 of Pregnancy 1 (FIG. 20A) have larger GGTA 1 amplicons than the WT suggesting an insertion within the target area. In fetus 3 of Pregnancy 1 (FIG. 20A), the GGTA 1 amplicon migrated faster than the WT control suggesting a deletion within the target area. Fetuses 6 and 7 of Pregnancy 1 (FIG. 20A) NLRC5 amplicons migrated faster than the WT suggesting a deletion within the target area. Fetuses 1-5 (FIG. 20B) GGTA1 amplicons were difficult to interpret by size and were diffuse as compared to the WT control. Fetuses 1-5 (FIG. 20B) NLRC5 amplicons were uniform in size and density as compared to the wild type control.

[0112] FIGS. 21A-21E shows phenotypic analysis of fetuses from two separate litters of pigs (FIGS. 21A, 21B, 21C: Pregnancy 1 or FIGS. 21D-21E: Pregnancy 2). Fetuses were harvested at day 45 (Pregnancy 1) or 43 days (Pregnancy 2) and processed for DNA and culture cell isolation. Tissue fragments and cells were plated in culture media for 2 days to allow fetal cells to adhere and grow. Wild type cells (fetal cells not genetically modified) and fetal cells from pregnancy 1 and 2 were removed from culture plates and labeled with IB4 lectin conjugated to Alexa fluor 488 or anti-porcine MHC class I antibody conjugated to FITC. Flow cytometric analysis is shown as histograms depicting the labeling intensity of the cells tested. The histograms for the WT cells are included in each panel to highlight the decrease in overall intensity of each group of fetal cells. There is a decrease in alpha Gal and MHC class I labeling in pregnancy 1 (FIG. 21A) indicated as a decrease in peak intensity. In pregnancy 2 (FIG. 21B) fetuses 1 and 3 have a large decrease in alpha gal labeling and significant reduction in MHC class 1 labeling as compared to WT fetal cells.

[0113] FIGS. 22A-22C show the impact of decreased MHC class I expression in cells from Fetus 3 (Pregnancy 1) as compared to wild type fetal cells from a genetic clone. The proliferative response of human CD8+ cells and CD4 T cells to porcine control fibroblast and NLRC5 knockout fetal cells were measured. FIG. 22A. Cells were gated as CD4 or CD8 before assessment of proliferation. FIG. 22B. CD8 T cell proliferation was reduced following treatments stimulation by porcine fetal GGTA1/NLRC5 knockout cells compared to control unmodified porcine fibroblast. Almost a 55% reduction in CD8 T cells proliferation was observed when human responders were treated with porcine fetal GGTA1/NLRC5 knockout cells at 1:1 ratio. Wild type fetal cells elicited a 17.2% proliferation in human CD8 T cells whereas the MHC class I deficient cells from fetus 3 (Pregnancy 1) induced only a 7.6% proliferation. FIG. 22C. No differences were seen in CD8 T cells proliferative response at 1:5 and 1:10 ratio compared to unmodified fetal cells. No changes were observed in CD4 T cell proliferation in response to NLRC5 knockout and control unmodified porcine fetal cells at all ratios studied.

[0114] FIG. 23 shows live birth of GGTA1/NLRC5 knockout piglets generated using CRISPR/Cas technology.

[0115] FIGS. 24A-24C show DNA gel analysis of the genotypes of the piglets generated in Example 6. FIG. 24A shows the result of the first PCR experiment in Example 6. FIG. 24B shows the result of the second PCR experiment in Example 6. FIG. 24C shows the result of the third PCR experiment in Example 6.

[0116] FIG. 25A shows the sequencing data and sequence call (SEQ ID NO: 350) of part of NLRC5 gene of piglet #1. FIG. 25B shows the sequencing data and sequence call (SEQ ID NO: 351) of part of NLRC5 gene of piglet #2. FIG. 25C shows the sequencing data and sequence call (SEQ ID NO: 352) of part of NLRC5 gene of piglet #4. FIG. 25D shows the sequencing data and sequence call (SEQ ID NO: 353) of part of NLRC5 gene of piglet #5. FIG. 25E shows the sequencing data and sequence call (SEQ ID NO: 354) of part of NLRC5 gene of piglet #6. FIG. 25F shows the sequencing data and sequence call (SEQ ID NO: 355) of part of NLRC5 gene of piglet #7.

[0117] FIG. 26A shows the left arm of Rosa26 in Example 8 (SEQ ID NO: 356). FIG. 26B shows DNA gel analysis of the construct for homology recombination in Example 8. FIG. 26C shows the consensus sequence of amplicon based on paired read analysis in Example 8 (SEQ ID NO: 357). FIGS. 26D (SEQ ID NO: 358), 26E (SEQ ID NO: 359), and 26F (SEQ ID NO: 360) show homology directed recombination construct for inserting HLA-G1 at Rosa26 locus in Example 8.

[0118] FIG. 27A shows the sequence of the correct px330 plasmid (SEQ ID NO: 362) containing Rosa26 targeting oligo generated in Example 8, and sequencing primers (SEQ ID NOs: 361 and 363, respectively, in order of appearance). FIG. 27B shows the sequencing result of constructed px330 plasmid containing Rosa26 targeting oligo in Example 8. SEQ ID NOs: 364-366 are disclosed, respectively, in order of appearance. FIG. 27C shows restriction digestion of the constructed px330 plasmid containing Rosa26 targeting oligo in Example 8.

[0119] FIG. 28 shows the map of GalMet plasmid and oligos (SEQ ID NOs: 367-368, respectively, in order of appearance) used in Example 8.

[0120] FIG. 29 shows in vitro Cas9-mediated cleavage reactions of in vitro transcribed gRNA. Lane 1: Uncleaved pig Rosa26 (2000 bp). Lane 2: designed gRNA directed Cas9 cleavage of pig Rosa26; Lane 3: Uncleaved Pig GGTA1; Lane 4: designed gRNA directed Cas9 cleavage of GGTA1 template.

[0121] FIG. 30 shows sorting of genetically modified cell generated in Example 8 by flow cytometry.

[0122] FIG. 31 shows the construct for homology recombination of CD47 to GGTA1 locus generated in Example 9 (SEQ ID NO: 369).

[0123] FIG. 32 shows the sequence of the right arm (FIG. 32A; SEQ ID NO: 370) and the left arm (FIG. 32B; SEQ ID NO: 371) of GGTA1 locus in Example 9.

[0124] FIGS. 33A, 33B, and 33C show the sorting of unstained cells in Example 9.

[0125] FIGS. 34A, 34B, and 34C show the sorting of px330 stained cells in Example 9.

[0126] FIGS. 35A, 35B, and 35C show the sorting IB4 stained cells in Example 9.

[0127] FIGS. 36A, 36B, and 36C show the sorting of CD47/IB4 stained cells in Example 9.

[0128] FIGS. 37A, 37B, and 37C show the sorted IB4 stained cells CD47/IB4 stained cells in Example 9.

[0129] FIGS. 38A, 38B, and 38C show the sorted CD47/IB4 stained cells in Example 9.

[0130] FIG. 39 shows the gating strategy used for the selection of single cells and live cells for analysis. Total CD3+ cells were observed with in that population CD4+ and CD8+ cells were selected and counted for experimental parameters.

[0131] FIGS. 40A and 40B show A. unstimulated cells in quadrant 2 showed insignificant expansion when in culture conditions identical to the same cells stimulated with PHA. B. PHA stimulation induced 20.7% (CD3), 24.7% (CD4), 18.4% (CD8), and 21% (CD20) proliferation in lymphocytic samples suggesting the maximum amount of stimulation possible in this assay.

[0132] FIG. 41 shows flow cytometry results of a co-culture assay where CD8+ T cells were added to cultures of adherent WT or genetically engineered porcine fibroblasts at a dilution of 100:1, 50:1, 10:1, or 1:1. WT cells stimulated T cells to proliferate at 50:1, 10:1, and 1:1 ratios. GM cells #3 and #4 showed little effect at stimulating T cells at the 100:1, 50:1, and 10:1 ratios suggesting a complete abrogation of T cells proliferation response.

[0133] FIG. 42 shows flow cytometry results of a co-culture assay where CD4+ T cells were added to cultures of adherent WT or genetically engineered porcine fibroblasts at a dilution of 100:1, 50:1, 10:1, and 1:1. GM cells #3 and #4 showed little effect at stimulating T cells at the 100:1, 50:1, and 10:1 ratios suggesting a complete abrogation of T cells proliferation response.

[0134] FIG. 43 shows flow cytometry results of a co-culture assay where CD3+ T cells (overall CD 4 and CD8) were added to cultures of adherent WT or genetically engineered porcine fibroblasts at a dilution of 100:1, 50:1, 10:1, and 1:1. GM cells #3 and #4 showed little effect at stimulating T cells at the 100:1, 50:1, and 10:1 ratios suggesting a complete abrogation of T cells proliferation response.

[0135] FIG. 44 shows B cell proliferation inhibition by approximately 50% when incubated with GGTA1/NLRC5 knock out cells as compared to wild type cells.

[0136] FIG. 45 shows flow cytometry results of a co-culture assay where cytokines were measured by incubating human lymphocytes with WT or GM cells followed by the introduction of brefeldin A to block endocytosis causing the accumulation of the 4 cytokines intracellularly in endosomes. Fixation and permeabilization of the cells allows intracellular measurement of the accumulation of cytokines. Within the CD8 T cell population no IL2 stimulation was observed at 100:1 ratio moderate reductions in CD107a, Perforin and Granzyme were observed at the 100:1 ratio. Perforin and granzyme B double positive cells are significantly inhibited at the 100:1 and 10:1 ratios.

[0137] FIG. 46 shows flow cytometry results of a co-culture assay of human lymphocytes with WT or genetically modified porcine fibroblasts at a T cells vs FC ratio=10:1. Within the CD8 T cell population IL2 was stimulated at 10:1 ratio and reduced by approximately 40% in culture with genetically modified porcine cells. CD107a, expression was reduced by approximately 25%. Perforin expression was reduced by approximately 40% and Granzyme was unaffected at this ratio of incubation.

[0138] FIG. 47 shows flow cytometry results of a co-culture assay of human lymphocytes with WT or genetically modified porcine fibroblasts at a T cells vs FC ratio=10:1. Within CD3 cells CD107a was reduced by approximately 50%. Perforin and Granzyme B was also reduced after incubation with genetically modified cells and was reflected when compared as double positive cells retreating from quadrant 2.

[0139] FIG. 48 shows flow cytometry results of a co-culture assay of human lymphocytes with WT or genetically modified porcine fibroblasts at a T cells vs FC ratio=10:1. CD4+ T cells were activated less in the presence of GM cells to produce cytokines. IL2 expression was reduced by 40%. CD107a was reduced by approx. 50%. Perforin and Granzyme B were reduced by approximately 50% and 30%, respectively.

[0140] FIG. 49 shows flow cytometry results of a co-culture assay of human lymphocytes with WT or genetically modified porcine fibroblasts at a T cell vs FC ratio=10:1. Among CD3 cells IFNγ expression was significantly reduced when lymphocytes were cultured with GM pig fibroblasts at a 10:1 ratio. TNFa expression was low in culture with WT cells but reduced when in culture with GM cells. Within this experiment Granzyme B was also dramatically reduced when incubated with GM cells as compared to WT cells.

[0141] FIG. 50 shows flow cytometry results of a co-culture assay of human lymphocytes with WT or genetically modified porcine fibroblasts at a T cell vs FC ratio=10:1. Among CD4 cells IFNγ expression was significantly reduced when lymphocytes were cultured with GM pig fibroblasts at a 10:1 ratio. TNFa expression was low in culture with WT cells but reduced when in culture with GM cells. Within this experiment Granzyme B was also dramatically reduced when incubated with GM cells as compared to WT cells.

[0142] FIG. 51 shows flow cytometry results of a co-culture assay of human lymphocytes with WT or genetically modified porcine fibroblasts at a T cell vs FC ratio=10:1. Among CD8 cells IFNγ expression was significantly reduced when lymphocytes were cultured with GM pig fibroblasts at a 10:1 ratio. TNFa expression was low in culture with WT cells but reduced when in culture with GM cells. Within this experiment Granzyme B was also dramatically reduced when incubated with GM cells as compared to WT cells.

[0143] FIG. 52 shows flow cytometry results of a co-culture assay of human lymphocytes with WT or genetically modified porcine fibroblasts at a T cell vs FC ratio=10:1. NK cells (CD56+) have been shown to be activated in the absence of MHC class I expression on cells. IFNγ (y axis) and Granzyme B (x axis) were expressed in co-culture with WT cells but significantly reduced when in co-culture with GGTA1/NLRC5 knock out cells. No expression or change in TNFa expression was observed with GM cells as compared to WT cells.

[0144] FIG. 53 shows Human PBMC incubated with WT pig fibroblasts had a normal background percentage of IL10 expressing CD4 positive T cells (11%). GGTA1/NLRC5 knockout cells labeled #3 and #4 respectively (13.3 and 20.2%) had a marginal effect on IL10 expression. Pig fibroblasts expressing the human inspired HLAG1 protein optimized for expression in pigs induced 60.7% of human CD4+ T cells to produce IL10.

[0145] FIG. 54 shows that soluble HLA-G (100 ng/ml) blocks the proliferation of CD8+, CD8− and PBMCs in the culture with WT porcine islet. Q1 and Q2 showing proliferating (CFSE lo) and non-proliferating fractions (CFSE hi) fractions, respectively.

[0146] FIG. 55 shows the flow cytometry gating strategy used to analyze CD3, CD4, or CD8 populations for cytokine and effector function molecular analysis of cultured human T cells with genetically modified porcine fibroblasts (HLAG1 expressing), WT, or WT plus PT85 antibody.

[0147] FIG. 56 shows cytometry data of the CD4 population co-cultured with wild type pig fibroblasts, WT pig fibroblasts with the PT85 antibody, or HLAG1 expressing pig fibroblasts. Substantial decrease in cytokines levels (IL-2) and effector molecules secretion were observed with PT85 blocking or HLAG1 expressing cells at ratio of 10: and 1:1 of MLR culture. The PT85 blocking antibody was used to determine how much of the observed immune inhibitory effects were due to the NLRC5 knock out (MHC class 1 null) or the GGTA1 knock out. The PT85 antibody mimicked the effect of the NLRC5 knockdown in the presence of normal WT alpha-Gal surface expression. The HLAG1 protein expression on the surface of the cells had a profound inhibitory effect on CD4+ and CD8+ T cells cytokine production as well as effector function.

[0148] FIG. 57 shows cytometry data of the CD8 population co-cultured with either wild type pig fibroblasts, WT pig fibroblasts with the PT85 antibody, or HLAG1 expressing pig fibroblasts. Substantial decrease in cytokines levels (IL-2) and effector molecules secretion were observed with PT85 blocking or HLAG1 expressing cells at ratio of 10: and 1:1 of MLR culture. The PT85 blocking antibody was used to determine how much of the observed immune inhibitory effects were due to the NLRC5 knock out (MHC class 1 null) or the GGTA1 knock out. The PT85 antibody mimicked the effect of the NLRC5 knockdown in the presence of normal WT alpha-Gal surface expression within the CD8 population. The HLAG1 protein expression on the surface of the cells had a profound inhibitory effect on CD4+ and CD8+ T cells cytokine production as well as effector functions. The HLAG1 protein expression on the surface of the cells had a profound inhibitory effect on CD4+ and CD8+ T cells cytokine production as well as effector functions.

[0149] FIG. 58 shows cytometry data of the CD4 population co-cultured with wild type pig fibroblasts, WT pig fibroblasts with the PT85 antibody, or HLAG1 expressing pig fibroblasts. Substantial decrease in cytokines levels (TNF-a, IFN-g) and effector molecules secretion was observed with PT85 blocking or HLAG1 expressing cells at ratio of 10: and 1:1 of MLR culture. The PT85 blocking antibody was used to determine how much of the observed immune inhibitory effects were due to the NLRC5 knock out (MHC class 1 null) or the GGTA1 knock out. The PT85 antibody mimicked the effect of the NLRC5 knockdown in the presence of normal WT alpha-Gal surface expression. The HLAG1 protein expression on the surface of the cells had a profound inhibitory effect on CD4+ and CD8+ T cells cytokine production as well as effector functions.

[0150] FIG. 59 shows cytometry data of the CD8 population co-cultured with wild type pig fibroblasts, WT pig fibroblasts with the PT85 antibody, or HLAG1 expressing pig fibroblasts. Substantial decrease in cytokines levels (TNF-a, IFN-g) and effector molecules secretion was observed with PT85 blocking or HLAG1 expressing cells at ratio of 10: and 1:1 of MLR culture. The PT85 blocking antibody was used to determine how much of the observed immune inhibitory effects were due to the NLRC5 knock out (MHC class 1 null) or the GGTA1 knock out. The PT85 antibody mimicked the effect of the NLRC5 knockdown in the presence of normal WT alpha-Gal surface expression. The HLAG1 protein expression on the surface of the cells had a profound inhibitory effect on CD4+ and CD8+ T cells cytokine production as well as effector functions.

[0151] FIG. 60 shows the flow gating scheme for the cellular proliferation/CFSE low population analysis.

[0152] FIGS. 61 A and B shows flow cytometric analysis of a cellular proliferation (CFSE dilution) experiment of CD3, CD4, or CD8 populations among A. unstimulated cells or B. PHA stimulated cells (positive control or maximal dilution).

[0153] FIG. 62 shows that T cell proliferation was reduced following stimulation by porcine fibroblast treated with PT-85 blocking Abs compared to control unmodified porcine fibroblast/WT at ratios 10:1 of Human PBMCs and FC respectively. Substantial reduction in T cells (CD3) proliferation was observed when human responder were treated with SLA-I blocking PT-85 Abs or HLA-G expressing at 10:1 and 1:1 ratio. Not much difference was seen in T cells proliferative response at 100:1 and 50:1 ratio compared to unmodified/WT porcine fibroblast.

[0154] FIG. 63 shows that T cell proliferation was reduced following stimulation by porcine fibroblast treated with PT-85 blocking Abs compared to control unmodified porcine fibroblast/WT at ratios 10:1 of Human PBMCs and FC respectively. Substantial reduction in T cells (CD4) proliferation was observed when human responder were treated with SLA-I blocking PT-85 Abs or HLA-G expressing at 10:1 and 1:1 ratio. Not much difference was seen in T cells proliferative response at 100:1 and 50:1 ratio compared to unmodified/WT porcine fibroblast.

[0155] FIG. 64 shows reduced T cell proliferation following stimulation by porcine fibroblast treated with PT-85 blocking Abs compared to control unmodified porcine fibroblast/WT at ratios 10:1 of Human PBMCs and FC respectively. Substantial reduction in T cells (CD8) proliferation was observed when human responder were treated with SLA-I blocking PT-85 Abs or HLA-G expressing at 10:1 and 1:1 ratio. Not much difference was seen in T cells proliferative response at 100:1 and 50:1 ratio compared to unmodified/WT porcine fibroblast.

[0156] FIG. 65 shows reduced T cell proliferation following stimulation by porcine fibroblast treated with PT-85 blocking Abs compared to control unmodified porcine fibroblast/WT at ratios 10:1 of Human PBMCs and FC respectively. No substantial reduction in B cells proliferation either with blocking SLA-I with PT-85 or HLA-G expression.

[0157] FIG. 66 shows that IFNγ is produced predominantly by natural killer (NK) and natural killer T (NKT) cells as part of the innate immune response. DKO #3 and #4 are genetically and phenotypically GGTA1/NLRC5 knock out cells made separately. IFNγ is also produced by CD4 Th1 and CD8 cytotoxic T lymphocyte (CTL) effector T cells after antigen-specific immunity develops.

[0158] FIG. 67 shows GMC-SF production among genetically modified cells cultured with human immune cells and controls. Double knock out (DKO) cells had no ability to stimulate GM-CSF production. HLAG1 had significantly reduced expression. DKO #3 and #4 are genetically and phenotypically GGTA1/NLRC5 knock out cells made separately.

[0159] FIG. 68 shows IL-17 A expression among genetically modified cells cultured with human immune cells. DKO and HLAG1 transgenic cells both had no ability to induce a pro inflammatory response from human PBMC.

[0160] FIG. 69 shows Fractalkine expression among genetically modified porcine cells cultured with human immune cells. HLAG1 expression remains a significant inhibitor of T cells activation and fractalkine production though expressed on a log scale.

[0161] FIG. 70 shows TNF alpha expression among genetically modified porcine cells cultured with human immune cells.

[0162] FIG. 71 shows the IL-6 production among genetically modified porcine cells cultured with human immune cells.

[0163] FIG. 72 shows IL-4 production among genetically modified porcine cells cultured with human immune cells.

[0164] FIG. 73 shows MIP 1 alpha production among genetically modified porcine cells cultured with human immune cells.

[0165] FIG. 74 shows MIP 1 beta production among genetically modified porcine cells cultured with human immune cells.

[0166] FIG. 75 shows that T cell proliferation was reduced following stimulation by porcine fibroblast treated with PT-85 blocking Abs compared to control unmodified porcine fibroblast/WT at ratios 10:1 of Human PBMCs and FC respectively. Substantial reduction in T cells (CD3) proliferation was observed when human responder were treated with SLA-I blocking PT-85 Abs or HLA-G expressing at 10:1 and 1:1 ratio. Not much difference was seen in T cells proliferative response at 100:1 and 50:1 ratio compared to unmodified/WT porcine fibroblast.

[0167] FIG. 76 shows that T cell proliferation was reduced following stimulation by porcine fibroblast treated with PT-85 blocking Abs compared to control unmodified porcine fibroblast/WT at ratios 10:1 of Human PBMCs and FC respectively. Substantial reduction in T cells (CD4) proliferation was observed when human responder were treated with SLA-I blocking PT-85 Abs or HLA-G expressing at 10:1 and 1:1 ratio. Not much difference was seen in T cells proliferative response at 100:1 and 50:1 ratio compared to unmodified/WT porcine fibroblast.

[0168] FIG. 77 shows reduced T cell proliferation following stimulation by porcine fibroblast treated with PT-85 blocking Abs compared to control unmodified porcine fibroblast/WT at ratios 10:1 of Human PBMCs and FC respectively. Substantial reduction in T cells (CD8) proliferation was observed when human responder were treated with SLA-I blocking PT-85 Abs or HLA-G expressing at 10:1 and 1:1 ratio. Not much difference was seen in T cells proliferative response at 100:1 and 50:1 ratio compared to unmodified/WT porcine fibroblast.

[0169] FIG. 78 shows reduced T cell proliferation following stimulation by porcine fibroblast treated with PT-85 blocking Abs compared to control unmodified porcine fibroblast/WT at ratios 10:1 of Human PBMCs and FC respectively. No substantial reduction in B cells proliferation either with blocking SLA-I with PT-85 or HLA-G expression

[0170] FIG. 79 shows IFN gamma expression after co-culture of human mixed lymphocytes and porcine genetically modified cells. Double knock out (DKO) #3 and #4 are genetically and phenotypically GGTA1/NLRC5 knock out cells made separately. The HLA-G1 transgenic cells were conducted in a separate experiment with human donor #2 (FIG. 79B) (but not human donor #1; FIG. 79A), and therefore include matching unstimulated and wild type cell controls.

[0171] FIG. 80 shows GM-CSF gamma expression after co-culture of human mixed lymphocytes and porcine genetically modified cells. Double knock out (DKO) #3 and #4 are genetically and phenotypically GGTA1/NLRC5 knock out cells made separately. The HLA-G1 transgenic cells were conducted in a separate experiment with human donor #2 (FIG. 80B) (but not human donor #1; FIG. 80A), and therefore include matching unstimulated and wild type cell controls.

[0172] FIG. 81 shows IL-2 expression after co-culture of human donor #1 mixed lymphocytes and porcine genetically modified cells. Double knock out (DKO) #3 and #4 are genetically and phenotypically GGTA1/NLRC5 knock out cells made separately.

[0173] FIG. 82 shows IL-17 alpha expression after co-culture of human mixed lymphocytes from two donors (FIGS. 82A and B) and porcine genetically modified cells. Double knock out (DKO) #3 and #4 are genetically and phenotypically GGTA1/NLRC5 knock out cells made separately. DKO and HLA-G1 transgenic cells both had no ability to induce a pro inflammatory response from human PBMC.

[0174] FIG. 83 shows Fractalkine expression after co-culture of human mixed lymphocytes and porcine genetically modified cells. Double knock out (DKO) #3 and #4 are genetically and phenotypically GGTA1/NLRC5 knock out cells made separately. The HLA-G1 transgenic cells were conducted in a separate experiment with human donor #2 (FIG. 83B) (but not human donor #1; FIG. 83A), and therefore include matching unstimulated and wild type cell controls. HLA-G1 expression remains a significant inhibitor of T cells activation and fractalkine production though expressed on a log scale.

[0175] FIG. 84 shows TNF alpha expression after co-culture of human mixed lymphocytes and porcine genetically modified cells. Double knock out (DKO) #3 and #4 are genetically and phenotypically GGTA1/NLRC5 knock out cells made separately. The HLA-G1 transgenic cells were conducted in a separate experiment with human donor #2 (FIG. 84B) (but not human donor #1; FIG. 84A), and therefore include matching unstimulated and wild type cell controls.

[0176] FIG. 85 shows IL-6 expression after co-culture of human mixed lymphocytes and porcine genetically modified cells. Double knock out (DKO) #3 and #4 are genetically and phenotypically GGTA1/NLRC5 knock out cells made separately. The HLA-G1 transgenic cells were conducted in a separate experiment with human donor #2 (FIG. 85B) (but not human donor #1; FIG. 85A), and therefore include matching unstimulated and wild type cell controls.

[0177] FIG. 86 shows IL-4 expression after co-culture of human mixed lymphocytes and porcine genetically modified cells. Double knock out (DKO) #3 and #4 are genetically and phenotypically GGTA1/NLRC5 knock out cells made separately. The HLA-G1 transgenic cells were conducted in a separate experiment with human donor #2 (FIG. 86B) (but not human donor #1; FIG. 86A), and therefore include matching unstimulated and wild type cell controls.

[0178] FIG. 87 shows MIP-1 alpha expression after co-culture of human mixed lymphocytes and porcine genetically modified cells. Double knock out (DKO) #3 and #4 are genetically and phenotypically GGTA1/NLRC5 knock out cells made separately. The HLA-G1 transgenic cells were conducted in a separate experiment with human donor #2 (FIG. 87B) (but not human donor #1; FIG. 87A), and therefore include matching unstimulated and wild type cell controls.

[0179] FIG. 88 shows MIP-1 beta expression after co-culture of human mixed lymphocytes and porcine genetically modified cells. Double knock out (DKO) #3 and #4 are genetically and phenotypically GGTA1/NLRC5 knock out cells made separately. The HLA-G1 transgenic cells were conducted in a separate experiment with human donor #2 (FIG. 88B) (but not human donor #1; FIG. 88A), and therefore include matching unstimulated and wild type cell controls.

[0180] FIG. 89 shows the CRISPR/Cas construct within the PX333 vector.

[0181] FIG. 90 shows transfection schematic of primary porcine fibroblast using constructs: GGTA1-10/B4GALNT2 (condition 2), NLRC5-6/B4GALNT2 (condition 3), GGTA1-10/B4GALNT2 and NLRC5-6/B4GALNT2 (condition 4), Condition 1 (WT): cells only.

[0182] FIG. 91 shows genetically Modified Selection using Magnetic Bead Sorting.

[0183] FIG. 92 shows Genetically Modified Selection using Cell Sort of SLA I+/IB4+(top right); SLA I+/IB4− (bottom right); SLA I−/IB4+(top left); and SLA I−/IB4 (bottom left).

[0184] FIG. 93 shows flow cytometric analysis of Condition 2: GGTA1-10/B4GALNT2.

[0185] FIG. 94 shows flow cytometric analysis of Condition 3: NLRC5-6/B4GALNT2.

[0186] FIG. 95 shows flow cytometric analysis of Condition 4: GGTA1-10/B4GALNT2+NLRC5-6/B4GALNT2.

[0187] FIG. 96 shows flow cytometric analysis of Condition 2: GGTA1-10/B4GALNT2 post sort. Each population was sorted to verify that the right population was acquired post sorting and there was no cross-samples from other gates.

[0188] FIG. 97 shows flow cytometric analysis of Condition 3: NLRC5-6/B4GALNT2. Each population was sorted to verify that the right population was acquired post sorting and there was no cross-samples from other gates.

[0189] FIG. 98 shows flow cytometric analysis of Condition 4: GGTA1-10/B4GALNT2+NLRC5-6/B4GALNT2. Each population was sorted to verify that the right population was acquired post sorting and there was no cross-samples from other gates.

[0190] FIGS. 99A and 99B show flow cytometric analysis of IB4 lectin among A. WT unstained, all cells unstained, WT negative, and condition #2 Gal negative fraction cultured with WT or PFF1. B. Side scatter vs forward scatter of condition #4 Gal negative fraction, WT positive, Conditions #2 Gal Positive fraction. Condition #3Gal positive fraction or conditions #4 Gal positive fraction cultured with WT or PFF1.

[0191] FIG. 100 shows flow cytometric quantification of condition 1 (WT), 2, 3, and 4 (left to right, respectively) genetically modified cells.

[0192] FIGS. 101 A. and 101 B. shows flow cytometric analysis of SLAI among A. WT unstained, All cells unstained, WT negative, and condition #2 Gal negative fraction cultured with WT or PFF1. B. Side scatter vs forward scatter of condition #4 Gal negative fraction, WT positive, Conditions #2 Gal Positive fraction. Condition #3Gal positive fraction or conditions #4 Gal positive fraction cultured with WT or PFF1.

[0193] FIG. 102 shows flow cytometric quantification of SLA1 (FITC) among A. Condition 3 cells and B. Condition 4 cells.

[0194] FIGS. 103 A. and 103 B. show confocal microscopy of A. imaging results of WT porcine cells and genetically modified condition 2, 3, and 4 cells. B. slides of imaged produced.

[0195] FIG. 104 shows sequencing results of NLRC5 sequencing of condition and condition 4 cell lines. SEQ ID NOs: 372-376 are disclosed, respectively, in order of appearance.

[0196] FIG. 105 shows a table of PCR oligos and target sequences (column two) for GG1, Gal2-1, Gal 2-2, Gal 2-3, Gal 2-4, Gal 2-5, GGTA1-10, GGTA1-11, GGTA1-16, NL1, NLRC5-6, NLRC5-7, NLRC5-8. SEQ ID NOs: 377-404 are disclosed, respectively, in order of appearance in column 2. SEQ ID NOs: 405-413 are disclosed, respectively, in order of appearance in column 4. SEQ ID NOs: 414-422 are disclosed, respectively, in order of appearance in column 6.

[0197] FIG. 106 shows a table of PCR oligos and target sequences (column two) for CM1F, CM2RS, CM3RS, CM4RS. SEQ ID NOs: 423-430 are disclosed, respectively, in order of appearance in column 2. SEQ ID NOs: 431-434 are disclosed, respectively, in order of appearance in column 4. SEQ ID NOs: 435-437 are disclosed, respectively, in order of appearance in column 6.

[0198] FIGS. 107 A. and 107 B. show a table of A. Target sequences for gRNAs for B41, C3-9_1, C3-9_2, C3-5_1, C3-5_2, C3-15RS_1, C3-15RS_2. SEQ ID NOs: 438-447 are disclosed, respectively, in order of appearance in column 2. B. Deletion screening primer sequences and their respective target sequence for Gal 1. SEQ ID NOs: 448-453 are disclosed, respectively, in order of appearance in column 2.

[0199] FIG. 108 shows an overview of a Gal2-2 (B4GALNT2) vector and cloning strategy. A nucleotide sequence for a portion of the vector is disclosed (SEQ ID NO: 454), as well as two oligos: Gal2-2_Forward (SEQ ID NO): 455) and Gal2-2_Reverse (SEQ ID NO: 456).

[0200] FIG. 109 shows the expected Gal2-2 (B4GALNT2) clone sequence upon correct insertion based on the vector and cloning strategy of FIG. 113 (top panel). SEQ ID NOs: 457-459 are disclosed, respectively, in order of appearance. The sequencing results of the constructed plasmid (SEQ ID NO: 462) are aligned against the expected sequence (SEQ ID NOs: 460-461) in the bottom panel.

[0201] FIGS. 110 A. and B. A. shows the Gal2-1 (B4GALNT2) target site within GGTA1 gene (SEQ ID NO: 464) and two oligos (Gal2-1_screen_Forward_1, SEQ ID NO: 463; and Gal2-1_screen_Reverse_1, SEQ ID NO: 465). B. shows Gal2-1_screen_1 primer set, Gal2-1_screen primer set PCR product observed on gel and expected amplicon size of 303 bp. The strong single band observed at expected amplicon size product was sequence verified and was shown to include Gal2-1 target cut-sites desired for screening.

[0202] FIGS. 111 A. and 111 B. A. shows the CM1F target site within CMAH gene (SEQ ID NO: 467) and two oligos (CM1F-1_screen_Forward_1, SEQ ID NO: 466; and CM1F-1_screen_Reverse_1, SEQ ID NO: 468). B. shows CM1F_screen_1 primer set expected amplicon size of 309 bp, CM1F_screen primer set PCR product observed on gel. A strong band observed at the expected amplicon size; faint band observed at ˜600 bp as well. Product at approximately 300 bp was sequence verified and was shown to include the target cut-site as desired for screening.

[0203] FIGS. 112 A. and 112 B. A. shows NL1_First target site within NLRC5 gene (SEQ ID NO: 470) and two oligos (NLR amp2 forward, SEQ ID NO: 469; and NLR amp2 reverse, SEQ ID NO: 471). B. shows NLR amp 2 primer set expected amplicon size: 217 bp, NLR amp 2 primer set PCR product observed on gel, the strong single band observed at the expected amplicon size. The product was sequence verified and was shown to include NL1_First target cut-site as desired for screening.

[0204] FIGS. 113 A to 113 I represent exon 1 genomic modifications of Gal2-2 and NLRC5 genes. A. shows the location of screening primers for Gal. B. Gal2-2 PCR Screen using Gal2-2 screen 1 primers. C. sequence results for Gal 2-2. SEQ ID NOs: 472-478 are disclosed respectively, in order of appearance. D. GGTA1-10 PCR screen using GGTA1-10,11 screen primers. E. NLRC5-6 Screen Primers Location F. NLRC5-6 set A (NLRC5-678 screen primers) G. NLRC5-6 Sequence Results from Set A. SEQ ID NOs: 479-486 are disclosed respectively, in order of appearance. H. NLRC5-6 set B (NLRC5-678 Forward and NLR1st screen 2 Reverse screen primers) I. NLRC5-6 set C (NLRC5-678 Forward and NLR1st screen 2 Reverse screen primers).

[0205] FIGS. 114 A-C show live births of GGTA1/NLRC5 knockout/HLA-G1 knockin piglets generated using CRISPR/Cas technology.

[0206] FIG. 115 shows the sequencing results confirming insertion of HLA-G1 into the ROSA gene site. SEQ ID NO: 499 is disclosed.

[0207] FIG. 116 shows the sequence results confirming correct construction of the homology directed recombination construct for inserting HLA-G1 at Rosa26 locus in Example 8. SEQ ID NO: 500 is disclosed.

[0208] FIG. 117 shows the sequence of a left arm corresponding to the Rosa26 locus that can be used in the construction of a homology targeting vector for insertion of HLA-G1, or another sequence, into the Rosa26 locus. SEQ ID NO: 501 is disclosed.

[0209] FIG. 118 shows the sequence of a modified HLA-G encoding sequence that can be used in the construction of a homology targeting vector for insertion of HLA-G1 into a genetic loci such as a Rosa26 locus. SEQ ID NO: 502 is disclosed.

[0210] FIG. 119 shows the sequence of a right arm corresponding to the Rosa26 locus that can be used in the construction of a homology targeting vector for insertion of HLA-G1, or another sequence, into the Rosa26 locus. SEQ ID NO: 503 is disclosed.

### DETAILED DESCRIPTION OF THE DISCLOSURE

[0211] The following description and examples illustrate embodiments of the invention in detail. It is to be understood that this invention is not limited to the particular embodiments described herein and as such can vary. Those of skill in the art will recognize that there are numerous variations and modifications of this invention, which are encompassed within its scope.

[0212] Graft rejection can be prevented by methods tempering the immune response, including those described herein. For example, one method described herein to prevent transplantation rejection or prolong the time to transplantation rejection without or with minimal immunosuppressive drug use, an animal, e.g., a donor non-human animal, could be altered, e.g., genetically. Subsequently, the cells, organs, and/or tissues of the altered animal, e.g., a donor non-human animal, can be harvested and used in allografts or xenografts. Alternatively, cells can be extracted from an animal, e.g., a human or non-human animal (including but not limited to primary cells) or cells can be previously extracted animal cells, e.g., cell lines. These cells can be used to create a genetically altered cell.

[0213] Transplant rejection (e.g., T cells-mediated transplant rejection) can be prevented by chronic immunosuppression. However, immunosuppression is costly and associated with the risk of serious side effects. To circumvent the need for chronic immunosuppression, a multifaceted, T cell-targeted rejection prophylaxis was developed (FIG. 1) that
[0214] i) utilizes genetically modified grafts lacking functional expression of MHC class I, thereby interfering with activation of CD8⁺T cells with direct specificity and precluding cytolytic effector functions of these CD8⁺ T cells,
[0215] ii) interferes with B cell (and other APC)-mediated priming and memory generation of anti-donor T cells using induction immunotherapy comprising antagonistic anti-CD40 mAbs (and depleting anti-CD20 mAbs and a mTOR inhibitor), and/or
[0216] iii) depletes anti-donor T cells with indirect specificity via peritransplant infusions of apoptotic donor cell vaccines.

[0217] Described herein are genetically modified non-human animals (such as non-human primates or a genetically modified animal that is member of the Laurasiatheria superorder, e.g., ungulates) and organs, tissues, or cells isolated therefrom, tolerizing vaccines, and methods for treating or preventing a disease in a recipient in need thereof by transplantation of an organ, tissue, or cell isolated from a non-human animal. An organ, tissue, or cell isolated from a non-human animal (such as non-human primates or a genetically modified animal that is member of the Laurasiatheria superorder, e.g., ungulates) can be transplanted into a recipient in need thereof from the same species (an allotransplant) or a different species (a xenotransplant). A recipient can be tolerized with a tolerizing vaccine and/or one or more immunomodulatory agents (e.g., an antibody). In embodiments involving xenotransplantation the recipient can be a human. Suitable diseases that can be treated are any in which an organ, tissue, or cell of a recipient is defective or injured, (e.g., a heart, lung, liver, vein, skin, or pancreatic islet cell) and a recipient can be treated by transplantation of an organ, tissue, or cell isolated from a non-human animal.

[0218] Human Leukocyte Antigen G (HLA-G) HLA-G can be a potent immuno-inhibitory and tolerogenic molecule. Accordingly, in one aspect, disclosed herein are genetically modified non-human animals and cells comprising an exogenous nucleic acid sequence encoding for an HLA-G protein. The genetically modified non-human animals and cells can also comprise one or more additional genetic modifications, such as any of the genetic modifications (e.g., knock-ins, knock-outs, gene disruptions, etc.) disclosed herein.

### Definitions

[0219] The term “about” in relation to a reference numerical value and its grammatical equivalents as used herein can include the numerical value itself and a range of values plus or minus 10% from that numerical value. For example, the amount “about 10” includes 10 and any amounts from 9 to 11. For example, the term “about” in relation to a reference numerical value can also include a range of values plus or minus 10%, 9%, 8%, 7%, 6%, 5%, 4%, 3%, 2%, or 1% from that value.

[0220] The term “non-human animal” and its grammatical equivalents as used herein includes all animal species other than humans, including non-human mammals, which can be a native animal or a genetically modified non-human animal. A non-human mammal includes, an ungulate, such as an even-toed ungulate (e.g., pigs, peccaries, hippopotamuses, camels, llamas, chevrotains (mouse deer), deer, giraffes, pronghorn, antelopes, goat-antelopes (which include sheep, goats and others), or cattle) or an odd-toed ungulate (e.g., horse, tapirs, and rhinoceroses), a non-human primate (e.g., a monkey, or a chimpanzee), a Canidae (e.g., a dog) or a cat. A non-human animal can be a member of the Laurasiatheria superorder. The Laurasiatheria superorder can include a group of mammals as described in Waddell et al., Towards Resolving the Interordinal Relationships of Placental Mammals. Systematic Biology 48 (1): 1-5 (1999). Members of the Laurasiatheria superorder can include Eulipotyphla (hedgehogs, shrews, and moles), Perissodactyla (rhinoceroses, horses, and tapirs), Carnivora (carnivores), Cetartiodactyla (artiodactyls and cetaceans), Chiroptera (bats), and Pholidota (pangolins). A member of Laurasiatheria superorder can be an ungulate described herein, e.g., an odd-toed ungulate or even-toed ungulate. An ungulate can be a pig. A member can be a member of Carnivora, such as a cat, or a dog. In some cases, a member of the Laurasiatheria superorder can be a pig.

[0221] The term “pig” and its grammatical equivalents as used herein can refer to an animal in the genus Sus, within the Suidae family of even-toed ungulates. For example, a pig can be a wild pig, a domestic pig, mini pigs, a Sus scrofa pig, a Sus scrofa domesticus pig, or inbred pigs.

[0222] The term “transgene” and its grammatical equivalents as used herein can refer to a gene or genetic material that can be transferred into an organism. For example, a transgene can be a stretch or segment of DNA containing a gene that is introduced into an organism. The gene or genetic material can be from a different species. The gene or genetic material can be synthetic. When a transgene is transferred into an organism, the organism can then be referred to as a transgenic organism. A transgene can retain its ability to produce RNA or polypeptides (e.g., proteins) in a transgenic organism. A transgene can comprise a polynucleotide encoding a protein or a fragment (e.g., a functional fragment) thereof. The polynucleotide of a transgene can be an exogenous polynucleotide. A fragment (e.g., a functional fragment) of a protein can comprise at least or at least about 5%, 10%, 20%, 30%, 40%, 50%, 60%, 70%, 80%, 90%, 95%, or 99% of the amino acid sequence of the protein. A fragment of a protein can be a functional fragment of the protein. A functional fragment of a protein can retain part or all of the function of the protein.

[0223] The term “exogenous nucleic acid sequence” can refer to a gene or genetic material that was transferred into a cell or animal that originated outside of the cell or animal. An exogenous nucleic acid sequence can by synthetically produced. An exogenous nucleic acid sequence can be from a different species, or a different member of the same species. An exogenous nucleic acid sequence can be another copy of an endogenous nucleic acid sequence.

[0224] The term “genetic modification” and its grammatical equivalents as used herein can refer to one or more alterations of a nucleic acid, e.g., the nucleic acid within an organism's genome. For example, genetic modification can refer to alterations, additions, and/or deletion of genes. A genetically modified cell can also refer to a cell with an added, deleted and/or altered gene. A genetically modified cell can be from a genetically modified non-human animal. A genetically modified cell from a genetically modified non-human animal can be a cell isolated from such genetically modified non-human animal. A genetically modified cell from a genetically modified non-human animal can be a cell originated from such genetically modified non-human animal.

[0225] The term “gene knock-out” or “knock-out” can refer to any genetic modification that reduces the expression of the gene being “knocked out.” Reduced expression can include no expression. The genetic modification can include a genomic disruption.

[0226] The term “islet” or “islet cells” and their grammatical equivalents as used herein can refer to endocrine (e.g., hormone-producing) cells present in the pancreas of an organism. For example, islet cells can comprise different types of cells, including, but not limited to, pancreatic α cells, pancreatic β cells, pancreatic δ cells, pancreatic F cells, and/or pancreatic ε cells. Islet cells can also refer to a group of cells, cell clusters, or the like.

[0227] The term “condition” condition and its grammatical equivalents as used herein can refer to a disease, event, or change in health status.

[0228] The term “diabetes” and its grammatical equivalents as used herein can refer to is a disease characterized by high blood sugar levels over a prolonged period. For example, the term “diabetes” and its grammatical equivalents as used herein can refer to all or any type of diabetes, including, but not limited to, type 1, type 2, cystic fibrosis-related, surgical, gestational diabetes, and mitochondrial diabetes. In some cases, diabetes can be a form of hereditary diabetes.

[0229] The term “phenotype” and its grammatical equivalents as used herein can refer to a composite of an organism's observable characteristics or traits, such as its morphology, development, biochemical or physiological properties, phenology, behavior, and products of behavior. Depending on the context, the term “phenotype” can sometimes refer to a composite of a population's observable characteristics or traits.

[0230] The term “disrupting” and its grammatical equivalents as used herein can refer to a process of altering a gene, e.g., by deletion, insertion, mutation, rearrangement, or any combination thereof. For example, a gene can be disrupted by knockout. Disrupting a gene can be partially reducing or completely suppressing expression (e.g., mRNA and/or protein expression) of the gene. Disrupting can also include inhibitory technology, such as shRNA, siRNA, microRNA, dominant negative, or any other means to inhibit functionality or expression of a gene or protein.

[0231] The term “gene editing” and its grammatical equivalents as used herein can refer to genetic engineering in which one or more nucleotides are inserted, replaced, or removed from a genome. For example, gene editing can be performed using a nuclease (e.g., a natural-existing nuclease or an artificially engineered nuclease).

[0232] The term “transplant rejection” and its grammatical equivalents as used herein can refer to a process or processes by which an immune response of an organ transplant recipient mounts a reaction against the transplanted material (e.g., cells, tissues, and/or organs) sufficient to impair or destroy the function of the transplanted material.

[0233] The term “hyperacute rejection” and its grammatical equivalents as used herein can refer to rejection of a transplanted material or tissue occurring or beginning within the first 24 hours after transplantation. For example, hyperacute rejection can encompass but is not limited to “acute humoral rejection” and “antibody-mediated rejection”.

[0234] The term “negative vaccine”, “tolerizing vaccine” and their grammatical equivalents as used herein, can be used interchangeably. A tolerizing vaccine can tolerize a recipient to a graft or contribute to tolerization of the recipient to the graft if used under the cover of appropriate immunotherapy. This can help to prevent transplantation rejection.

[0235] The term “recipient”, “subject” and their grammatical equivalents as used herein, can be used interchangeably. A recipient or a subject can be a human or non-human animal. A recipient or a subject can be a human or non-human animal that will receive, is receiving, or has received a transplant graft, a tolerizing vaccine, and/or other composition disclosed in the application. A recipient or subject can also be in need of a transplant graft, a tolerizing vaccine and/or other composition disclosed in the application. In some cases, a recipient can be a human or non-human animal that will receive, is receiving, or has received a transplant graft.

[0236] Some numerical values disclosed throughout are referred to as, for example, “X is at least or at least about 100; or 200 [or any numerical number].” This numerical value includes the number itself and all of the following:
[0237] i) X is at least 100;
[0238] ii) X is at least 200;
[0239] iii) X is at least about 100; and
[0240] iv) X is at least about 200.
[0241] All these different combinations are contemplated by the numerical values disclosed throughout. All disclosed numerical values should be interpreted in this manner, whether it refers to an administration of a therapeutic agent or referring to days, months, years, weight, dosage amounts, etc., unless otherwise specifically indicated to the contrary.

[0242] The ranges disclosed throughout are sometimes referred to as, for example, “X is administered on or on about day 1 to 2; or 2 to 3 [or any numerical range].” This range includes the numbers themselves (e.g., the endpoints of the range) and all of the following:
[0243] i) X being administered on between day 1 and day 2;
[0244] ii) X being administered on between day 2 and day 3;
[0245] iii) X being administered on between about day 1 and day 2;
[0246] iv) X being administered on between about day 2 and day 3;
[0247] v) X being administered on between day 1 and about day 2;
[0248] vi) X being administered on between day 2 and about day 3;
[0249] vii) X being administered on between about day 1 and about day 2; and
[0250] viii) X being administered on between about day 2 and about day 3.
[0251] All these different combinations are contemplated by the ranges disclosed throughout. All disclosed ranges should be interpreted in this manner, whether it refers to an administration of a therapeutic agent or referring to days, months, years, weight, dosage amounts, etc., unless otherwise specifically indicated to the contrary.

[0252] The terms “and/or” and “any combination thereof” and their grammatical equivalents as used herein, can be used interchangeably. These terms can convey that any combination is specifically contemplated. Solely for illustrative purposes, the following phrases “A, B, and/or C” or “A, B, C, or any combination thereof” can mean “A individually; B individually; C individually; A and B; B and C; A and C; and A, B, and C.”

[0253] The term “or” can be used conjunctively or disjunctively, unless the context specifically refers to a disjunctive use.

[0254] I. Genetically Modified Non-Human Animals

[0255] Provided herein are genetically modified non-human animals that can be donors of cells, tissues, and/or organs for transplantation. A genetically modified non-human animal can be any desired species. For example, a genetically modified non-human animal described herein can be a genetically modified non-human mammal. A genetically modified non-human mammal can be a genetically modified ungulate, including a genetically modified even-toed ungulate (e.g., pigs, peccaries, hippopotamuses, camels, llamas, chevrotains (mouse deer), deer, giraffes, pronghorn, antelopes, goat-antelopes (which include sheep, goats and others), or cattle) or a genetically modified odd-toed ungulate (e.g., horse, tapirs, and rhinoceroses), a genetically modified non-human primate (e.g., a monkey, or a chimpanzee) or a genetically modified Canidae (e.g., a dog). A genetically modified non-human animal can be a member of the Laurasiatheria superorder. A genetically modified non-human animal can be a non-human primate, e.g., a monkey, or a chimpanzee. If a non-human animal is a pig, the pig can be at least or at least about 1, 5, 50, 100, or 300 pounds, e.g., the pig can be or be about between 5 pounds to 50 pounds; 25 pounds to 100 pounds; or 75 pounds to 300 pounds. In some cases, a non-human animal is a pig that has given birth at least one time.

[0256] A genetically modified non-human animal can be of any age. For example, the genetically modified non-human animal can be a fetus; from or from about 1 day to 1 month; from or from about 1 month to 3 months; from or from about 3 months to 6 months; from or from about 6 months to 9 months; from or from about 9 months to 1 year; from or from about 1 year to 2 years. A genetically modified non-human animal can be a non-human fetal animal, perinatal non-human animal, neonatal non-human animal, preweaning non-human animal, young adult non-human animal, or an adult non-human animal.

[0257] A genetically modified non-human animal can survive for at least a period of time after birth. For example the genetically modified non-human animal can survive for at least 1 day, 2 days, 3 days, 1 week, 2 week, 3 week, 1 month, 2 months, 4 months, 8 months, 1 year, 2 years, 5 years, or 10 years after birth. Multiple genetically modified animals (e.g., a pig) can be born in a litter. A litter of genetically modified animal can have at least 30%, 50%, 60%, 80%, or 90% survival rate, e.g., number of animals in a litter that survive after birth divided by the total number of animals in the litter.

[0258] A genetically modified non-human animal can comprise reduced expression of one or more genes compared to a non-genetically modified counterpart animal. The reduction of expression of a gene can result from mutations on one or more alleles of the gene. For example, a genetically modified animal can comprise a mutation on two or more alleles of a gene. In some cases, such genetically modified animal can be a diploid animal.

[0259] A genetically modified non-human animal can comprise reduced expression of one or more genes compared to a non-genetically modified counterpart animal. A genetically modified non-human animal can comprise reduced expression of two or more genes compared to a non-genetically modified counterpart animal. A genetically modified animal can have a genomic disruption in at least one gene selected from a group consisting of a component of an MHC I-specific enhanceosome, a transporter of an MHC I-binding peptide, a natural killer (NK) group 2D ligand, a CXC chemokine receptor (CXCR)3 ligand, MHC II transactivator (CIITA), C3, an endogenous gene not expressed in a human, and any combination thereof.

[0260] In some cases a genetically modified animal has reduced expression of a gene in comparison to a non-genetically modified counterpart animal. In some cases, a genetically modified animal survives at least 22 days after birth. In other cases, a genetically modified animal can survive at least or at least about 23 to 30, 25 to 35, 35 to 45, 45 to 55, 55 to 65, 65 to 75, 75 to 85, 85 to 95, 95 to 105, 105 to 115, 115 to 225, 225 to 235, 235 to 245, 245 to 255, 255 to 265, 265 to 275, 275 to 285, 285 to 295, 295 to 305, 305 to 315, 315 to 325, 325 to 335, 335 to 345, 345 to 355, 355 to 365, 365 to 375, 375 to 385, 385 to 395, or 395 to 400 days after birth.

[0261] A non-genetically modified counterpart animal can be an animal substantially identical to the genetically modified animal but without genetic modification in the genome. For example, a non-genetically modified counterpart animal can be a wild-type animal of the same species as the genetically modified animal.

[0262] A genetically modified non-human animal can provide cells, tissues or organs for transplanting to a recipient or subject in need thereof. A recipient or subject in need thereof can be a recipient or subject known or suspected of having a condition. The condition can be treated, prevented, reduced, eliminated, or augmented by the methods and compositions disclosed herein. The recipient can exhibit low or no immuno-response to the transplanted cells, tissues or organs. The transplanted cells, tissues or organs can be non-recognizable by CD8+ T cells, NK cells, or CD4+ T cells of the recipient (e.g., a human or another animal). The genes whose expression is reduced can include MHC molecules, regulators of MHC molecule expression, and genes differentially expressed between the donor non-human animal and the recipient (e.g., a human or another animal). The reduced expression can be mRNA expression or protein expression of the one or more genes. For example, the reduced expression can be protein expression of the one or more genes. Reduced expression can also include no expression. For example an animal, cell, tissue or organ with reduced expression of a gene can have no expression (e.g., mRNA and/or protein expression) of the gene. Reduction of expression of a gene can inactivate the function of the gene. In some cases, when expression of a gene is reduced in a genetically modified animal, the expression of the gene is absent in the genetically modified animal.

[0263] A genetically modified non-human animal can comprise reduced expression of one or more MHC molecules compared to a non-genetically modified counterpart animal. For example, the non-human animal can be an ungulate, e.g., a pig, with reduced expression of one or more swine leukocyte antigen (SLA) class I and/or SLA class II molecules.

[0264] A genetically modified non-human animal can comprise reduced expression of any genes that regulate major histocompatibility complex (MHC) molecules (e.g., MHC I molecules and/or MHC II molecules) compared to a non-genetically modified counterpart animal. Reducing expression of such genes can result in reduced expression and/or function of MHC molecules (e.g., MHC I molecules and/or MHC II molecules). In some cases, the one or more genes whose expression is reduced in the non-human animal can comprise one or more of the following: components of an MHC I-specific enhanceosome, transporters of a MHC I-binding peptide, natural killer group 2D ligands, CXC chemical receptor (CXCR) 3 ligands, complement component 3 (C3), and major histocompatibility complex II transactivator (CIITA). In some cases, the component of a MHC I-specific enhanceosome can be NLRC5. In some cases, the component of a MHC I-specific enhanceosome can also comprise regulatory factor X (RFX) (e.g., RFX1), nuclear transcription factor Y (NFY), and cAMP response element-binding protein (CREB). In some instances, the transporter of a MHC I-binding peptide can be Transporter associated with antigen processing 1 (TAP1). In some cases, the natural killer (NK) group 2D ligands can comprise MICA and MICB. For example, the genetically modified non-human animal can comprise reduced expression of one or more of the following genes: NOD-like receptor family CARD domain containing 5 (NLRC5), Transporter associated with antigen processing 1 (TAP1), C—X—C motif chemokine 10 (CXCL10), MHC class I polypeptide-related sequence A (MICA), MHC class I polypeptide-related sequence B (MICB), complement component 3 (C3), and CIITA. A genetically modified animal can comprise reduced expression of one or more of the following genes: a component of an MHC I-specific enhanceosome (e.g., NLRC5), a transporter of an MHC I-binding peptide (TAP1), and C3.

[0265] A genetically modified non-human animal can comprise reduced expression compared to a non-genetically modified counterpart of one or more genes expressed at different levels between the non-human animal and a recipient receiving a cell, tissue, or organ from the non-human animal. For example, the one or more genes can be expressed at a lower level in a human than in the non-human animal. In some cases, the one or more genes can be endogenous genes of the non-human animal. The endogenous genes are in some cases genes not expressed in another species. For example, the endogenous genes of the non-human animal can be genes that are not expressed in a human. For example, in some cases, homologs (e.g., orthologs) of the one or more genes do not exist in a human. In another example, homologs (e.g., orthologs) of the one or more genes can exist in a human but are not expressed.

[0266] In some cases, a non-human animal can be a pig, and the recipient can be a human. In these cases, the one or more genes can be any genes expressed in a pig but not in a human. For example, the one or more genes can comprise glycoprotein galactosyltransferase alpha 1, 3 (GGTA1), putative cytidine monophosphate-N-acetylneuraminic acid hydroxylase-like protein (CMAH), and β1,4 N-acetylgalactosaminyltransferase (B4GALNT2). A genetically modified non-human animal can comprise reduced expression of B4GALNT2, GGTA1, or CMAH, where the reduced expression is in comparison to a non-genetically modified counterpart animal. A genetically modified non-human animal can comprise reduced expression of B4GALNT2 and GGTA1, where the reduced expression is in comparison to a non-genetically modified counterpart animal. A genetically modified non-human animal can comprise reduced expression of B4GALNT2 and CMAH, where the reduced expression is in comparison to a non-genetically modified counterpart animal. A genetically modified non-human animal can comprise reduced expression of B4GALNT2, GGTA1, and CMAH, where the reduced expression is in comparison to a non-genetically modified counterpart animal.

[0267] The genetically modified non-human animal can comprise reduced expression compared to a non-genetically modified counterpart of one or more of any of the genes disclosed herein, including NLRC5, TAP1, CXCL10, MICA, MICB, C3, CIITA, GGTA1, CMAH, and B4GALNT2.

[0268] A genetically modified non-human animal can comprise one or more genes whose expression is reduced, e.g., where genetic expression is reduced. The one or more genes whose expression is reduced include but are not limited to NOD-like receptor family CARD domain containing 5 (NLRC5), Transporter associated with antigen processing 1 (TAP1), Glycoprotein galactosyltransferase alpha 1,3 (GGTA1), Putative cytidine monophosphate-N-acetylneuraminic acid hydroxylase-like protein (CMAH), C—X—C motif chemokine 10 (CXCL10), MHC class I polypeptide-related sequence A (MICA), MHC class I polypeptide-related sequence B (MICB), class II major histocompatibility complex transactivator (CIITA), Beta-1,4-N-Acetyl-Galactosaminyl Transferase 2 (B4GALNT2), complemental component 3 (C3), and/or any combination thereof.

[0269] A genetically modified non-human animal can comprise 1, 2, 3, 4, 5, 6, 7, 8, 9, 10, 11, 12, 13, 14, 15, 16, 17, 18, 19, 20 or more genes whose expression is disrupted. For illustrative purposes, and not to limit various combinations a person of skill in the art can envision, a genetically modified non-human animal can have NLRC5 and TAP1 individually disrupted. A genetically modified non-human animal can also have both NLRC5 and TAP1 disrupted. A genetically modified non-human animal can also have NLRC5 and TAP1, and in addition to one or more of the following GGTA1, CMAH, CXCL10, MICA, MICB, B4GALNT2, or CIITA genes disrupted; for example “NLRC5, TAP1, and GGTA1” or “NLRC5, TAP1, and CMAH” can be disrupted. A genetically modified non-human animal can also have NLRC5, TAP1, GGTA1, and CMAH disrupted. Alternatively, a genetically modified non-human animal can also have NLRC5, TAP1, GGTA1, B4GALNT2, and CMAH disrupted. In some cases, a genetically modified non-human animal can have C3 and GGTA1 disrupted. In some cases, a genetically modified non-human animal can have reduced expression of NLRC5, C3, GGTA1, B4GALNT2, CMAH, and CXCL10. In some cases, a genetically modified non-human animal can have reduced expression of TAP1, C3, GGTA1, B4GALNT2, CMAH, and CXCL10. In some cases, a genetically modified non-human animal can have reduced expression of NLRC5, TAP1, C3, GGTA1, B4GALNT2, CMAH, and CXCL10. A B4GALNT2 gene can be a Gal2-2 or Gal 2-1.

[0270] Lack of MHC class I expression on transplanted human cells can cause the passive activation of natural killer (NK) cells (Ohlen et al., 1989). Lack of MHC class I expression could be due to NLRC5, TAP1, or B2M gene deletion. NK cell cytotoxicity can be overcome by the expression of the human MHC class 1 gene, HLA-E, can stimulate the inhibitory receptor CD94/NKG2A on NK cells to prevent cell killing (Weiss et al., 2009; Lilienfeld et al., 2007; Sasaki et al., 1999). Successful expression of the HLA-E gene can be dependent on co-expression of the human B2M (beta 2 microglobulin) gene and a cognate peptide (Weiss et al., 2009; Lilienfeld et al., 2007; Sasaki et al., 1999; Pascasova et al., 1999). A nuclease mediated break in the stem cell DNA can allow for the insertion of one or multiple genes via homology directed repair. The HLA-E and hB2M genes in series can be integrated in the region of the nuclease mediated DNA break thus preventing expression of the target gene (for example, NLRC5) while inserting the transgenes.

[0271] Expression levels of genes can be reduced to various extents. For example, expression of one or more genes can be reduced by or by about 100%. In some cases, expression of one or more genes can be reduced by or by about 99%, 95%, 90%, 85%, 80%, 75%, 70%, 65%, 60%, 55%, or 50% of normal expression, e.g., compared to the expression of non-modified controls. In some cases, expression of one or more genes can be reduced by at least or to at least about 99% to 90%; 89% to 80%, 79% to 70%; 69% to 60%; 59% to 50% of normal expression, e.g., compared to the expression of non-modified controls. For example, expression of one or more genes can be reduced by at least or at least about 90% or by at least or at least about 90% to 99% of normal expression.

[0272] Expression can be measured by any known method, such as quantitative PCR (qPCR), including but not limited to PCR, real-time PCR (e.g., Sybr-green), and/or hot PCR. In some cases, expression of one or more genes can be measured by detecting the level of transcripts of the genes. For example, expression of one or more genes can be measured by Northern blotting, nuclease protection assays (e.g., RNase protection assays), reverse transcription PCR, quantitative PCR (e.g., real-time PCR such as real-time quantitative reverse transcription PCR), in situ hybridization (e.g., fluorescent in situ hybridization (FISH)), dot-blot analysis, differential display, serial analysis of gene expression, subtractive hybridization, microarrays, nanostring, and/or sequencing (e.g., next-generation sequencing). In some cases, expression of one or more genes can be measured by detecting the level of proteins encoded by the genes. For example, expression of one or more genes can be measured by protein immunostaining, protein immunoprecipitation, electrophoresis (e.g., SDS-PAGE), Western blotting, bicinchoninic acid assay, spectrophotometry, mass spectrometry, enzyme assays (e.g., enzyme-linked immunosorbent assays), immunohistochemistry, flow cytometry, and/or immunoctyochemistry. Expression of one or more genes can also be measured by microscopy. The microscopy can be optical, electron, or scanning probe microscopy. Optical microscopy can comprise use of bright field, oblique illumination, cross-polarized light, dispersion staining, dark field, phase contrast, differential interference contrast, interference reflection microscopy, fluorescence (e.g., when particles, e.g., cells, are immunostained), confocal, single plane illumination microscopy, light sheet fluorescence microscopy, deconvolution, or serial time-encoded amplified microscopy. Expression of MHC I molecules can also be detected by any methods for testing expression as described herein.

[0273] Disrupted Genes

[0274] Cells, organs, and/or tissues having different combinations of disrupted genes described herein, can result in cells, organs, and/or tissues that are less susceptible to rejection when transplanted into a recipient. For example, the inventors have found that disrupting (e.g., reducing expression of) certain genes, such as NLRC5, TAP1, GGTA1, B4GALNT2, CMAH, CXCL10, MICA, MICB, C3, and/or CIITA, can increase the likelihood of graft survival. In some cases, at least two genes are disrupted. For example, GGTA1-10 and Gal2-2 can be disrupted. In some cases, GGTA1-10, Gal2-2, and NLRC5-6 can be disrupted. In other cases, NLRC5-6 and Gal2-2 can be disrupted.

[0275] In some cases, the disruptions are not limited to solely these genes. It is contemplated that genetic homologues (e.g., any mammalian version of the gene) of the genes within this applications are covered. For example, genes that are disrupted can exhibit a certain identity and/or homology to genes disclosed herein, e.g., NLRC5, TAP1, GGTA1, B4GALNT2, CMAH, CXCL10, MICA, MICB, C3, and/or CIITA. Therefore, it is contemplated that a gene that exhibits at least or at least about 50%, 55%, 60%, 65%, 70%, 75%, 80%, 85%, 90%, 95%, 99%, or 100% homology (at the nucleic acid or protein level) can be disrupted, e.g., a gene that exhibits at least or at least about from 50% to 60%; 60% to 70%; 70% to 80%; 80% to 90%; or 90% to 99% homology. It is also contemplated that a gene that exhibits at least or at least about 50%, 55%, 60%, 65%, 70%, 75%, 80%, 85%, 90%, 99%, or 100% identity (at the nucleic acid or protein level) can be disrupted, e.g., a gene that exhibits at least or at least about from 50% to 60%; 60% to 70%; 70% to 80%; 80% to 90%; or 90% to 99% identity. Some genetic homologues are known in the art, however, in some cases, homologues are unknown. However, homologous genes between mammals can be found by comparing nucleic acid (DNA or RNA) sequences or protein sequences using publically available databases such as NCBI BLAST. Genomic sequences, cDNA and protein sequences of exemplary genes are shown in Table 1.

[0276] Gene suppression can also be done in a number of ways. For example, gene expression can be reduced by knock out, altering a promoter of a gene, and/or by administering interfering RNAs (knockdown). This can be done at an organism level or at a tissue, organ, and/or cellular level. If one or more genes are knocked down in a non-human animal, cell, tissue, and/or organ, the one or more genes can be reduced by administrating RNA interfering reagents, e.g., siRNA, shRNA, or microRNA. For example, a nucleic acid which can express shRNA can be stably transfected into a cell to knockdown expression. Furthermore, a nucleic acid which can express shRNA can be inserted into the genome of a non-human animal, thus knocking down a gene with in a non-human animal.

[0277] Disruption methods can also comprise overexpressing a dominant negative protein. This method can result in overall decreased function of a functional wild-type gene. Additionally, expressing a dominant negative gene can result in a phenotype that is similar to that of a knockout and/or knockdown.

[0278] In some cases a stop codon can be inserted or created (e.g., by nucleotide replacement), in one or more genes, which can result in a nonfunctional transcript or protein (sometimes referred to as knockout). For example, if a stop codon is created within the middle of one or more genes, the resulting transcription and/or protein can be truncated, and can be nonfunctional. However, in some cases, truncation can lead to an active (a partially or overly active) protein. In some cases, if a protein is overly active, this can result in a dominant negative protein, e.g., a mutant polypeptide that disrupts the activity of the wild-type protein.

[0279] This dominant negative protein can be expressed in a nucleic acid within the control of any promoter. For example, a promoter can be a ubiquitous promoter. A promoter can also be an inducible promoter, tissue specific promoter, and/or developmental specific promoter.

[0280] The nucleic acid that codes for a dominant negative protein can then be inserted into a cell or non-human animal. Any known method can be used. For example, stable transfection can be used. Additionally, a nucleic acid that codes for a dominant negative protein can be inserted into a genome of a non-human animal.

[0281] One or more genes in a non-human animal can be knocked out using any method known in the art. For example, knocking out one or more genes can comprise deleting one or more genes from a genome of a non-human animal. Knocking out can also comprise removing all or a part of a gene sequence from a non-human animal. It is also contemplated that knocking out can comprise replacing all or a part of a gene in a genome of a non-human animal with one or more nucleotides. Knocking out one or more genes can also comprise inserting a sequence in one or more genes thereby disrupting expression of the one or more genes. For example, inserting a sequence can generate a stop codon in the middle of one or more genes. Inserting a sequence can also shift the open reading frame of one or more genes. In some cases, knock out can be performed in a first exon of a gene. In other cases, knock out can be performed in a second exon of a gene.

[0282] Knockout can be done in any cell, organ, and/or tissue in a non-human animal. For example, knockout can be whole body knockout, e.g., expression of one or more genes is reduced in all cells of a non-human animal. Knockout can also be specific to one or more cells, tissues, and/or organs of a non-human animal. This can be achieved by conditional knockout, where expression of one or more genes is selectively reduced in one or more organs, tissues or types of cells. Conditional knockout can be performed by a Cre-lox system, where cre is expressed under the control of a cell, tissue, and/or organ specific promoter. For example, one or more genes can be knocked out (or expression can be reduced) in one or more tissues, or organs, where the one or more tissues or organs can include brain, lung, liver, heart, spleen, pancreas, small intestine, large intestine, skeletal muscle, smooth muscle, skin, bones, adipose tissues, hairs, thyroid, trachea, gall bladder, kidney, ureter, bladder, aorta, vein, esophagus, diaphragm, stomach, rectum, adrenal glands, bronchi, ears, eyes, retina, genitals, hypothalamus, larynx, nose, tongue, spinal cord, or ureters, uterus, ovary, testis, and/or any combination thereof. One or more genes can also be knocked out (or expression can be reduced) in one types of cells, where one or more types of cells include trichocytes, keratinocytes, gonadotropes, corticotropes, thyrotropes, somatotropes, lactotrophs, chromaffin cells, parafollicular cells, glomus cells melanocytes, nevus cells, merkel cells, odontoblasts, cementoblasts corneal keratocytes, retina muller cells, retinal pigment epithelium cells, neurons, glias (e.g., oligodendrocyte astrocytes), ependymocytes, pinealocytes, pneumocytes (e.g., type I pneumocytes, and type II pneumocytes), clara cells, goblet cells, G cells, D cells, Enterochromaffin-like cells, gastric chief cells, parietal cells, foveolar cells, K cells, D cells, I cells, goblet cells, paneth cells, enterocytes, microfold cells, hepatocytes, hepatic stellate cells (e.g., Kupffer cells from mesoderm), cholecystocytes, centroacinar cells, pancreatic stellate cells, pancreatic α cells, pancreatic β cells, pancreatic δ cells, pancreatic F cells, pancreatic ε cells, thyroid (e.g., follicular cells), parathyroid (e.g., parathyroid chief cells), oxyphil cells, urothelial cells, osteoblasts, osteocytes, chondroblasts, chondrocytes, fibroblasts, fibrocytes, myoblasts, myocytes, myosatellite cells, tendon cells, cardiac muscle cells, lipoblasts, adipocytes, interstitial cells of cajal, angioblasts, endothelial cells, mesangial cells (e.g., intraglomerular mesangial cells and extraglomerular mesangial cells), juxtaglomerular cells, macula densa cells, stromal cells, interstitial cells, telocytes simple epithelial cells, podocytes, kidney proximal tubule brush border cells, sertoli cells, leydig cells, granulosa cells, peg cells, germ cells, spermatozoon ovums, lymphocytes, myeloid cells, endothelial progenitor cells, endothelial stem cells, angioblasts, mesoangioblasts, pericyte mural cells, and/or any combination thereof.

[0283] Conditional knockouts can be inducible, for example, by using tetracycline inducible promoters, development specific promoters. This can allow for eliminating or suppressing expression of a gene/protein at any time or at a specific time. For example, with the case of a tetracycline inducible promoter, tetracycline can be given to a non-human animal any time after birth. If a non-human animal is a being that develops in a womb, then promoter can be induced by giving tetracycline to the mother during pregnancy. If a non-human animal develops in an egg, a promoter can be induced by injecting, or incubating in tetracycline. Once tetracycline is given to a non-human animal, the tetracycline will result in expression of cre, which will then result in excision of a gene of interest.

[0284] A cre/lox system can also be under the control of a developmental specific promoter. For example, some promoters are turned on after birth, or even after the onset of puberty. These promoters can be used to control cre expression, and therefore can be used in developmental specific knockouts.

[0285] It is also contemplated that any combinations of knockout technology can be combined. For example, tissue specific knockout can be combined with inducible technology, creating a tissue specific, inducible knockout. Furthermore, other systems such developmental specific promoter, can be used in combination with tissues specific promoters, and/or inducible knockouts.

[0286] In some cases, gene editing can be useful to design a knockout. For example, gene editing can be performed using a nuclease, including CRISPR associated proteins (Cas proteins, e.g., Cas9), Zinc finger nuclease (ZFN), Transcription Activator-Like Effector Nuclease (TALEN), and maganucleases. Nucleases can be naturally existing nucleases, genetically modified, and/or recombinant. For example, a CRISPR/Cas system can be suitable as a gene editing system.

[0287] It is also contemplated that less than all alleles of one or more genes of a non-human animal can be knocked out. For example, in diploid non-human animals, it is contemplated that one of two alleles are knocked out. This can result in decreased expression and decreased protein levels of genes. Overall decreased expression can be less than or less than about 99%, 95%, 90%, 85%, 80%, 75%, 70%, 65%, 60%, 55%, 50%, 45%, 40%, 35%, 30%, 25%, or 20%; e.g., from or from about 99% to 90%; 90% to 80%; 80% to 70%; 70% to 60%; 60% to 50%; 50% to 40%; 40% to 30%, or 30% to 20%; compared to when both alleles are functioning, for example, not knocked out and/or knocked down. Additionally, overall decrease in protein level can be the same as the decreased in overall expression. Overall decrease in protein level can be about or less than about 99%, 95%, 90%, 80%, 70%, 60%, 50%, 40%, 30%, or 20%, e.g., from or from about 99% to 90%; 90% to 80%; 80% to 70%; 70% to 60%; 60% to 50%; 50% to 40%; 40% to 30%, or 30% to 20%; compared to when both alleles are functioning, for example, not knocked out and/or knocked down. However, it is also contemplated that all alleles of one or more genes in a non-human animal can be knocked out.

[0288] Knockouts of one or more genes can be verified by genotyping. Methods for genotyping can include sequencing, restriction fragment length polymorphism identification (RFLPI), random amplified polymorphic detection (RAPD), amplified fragment length polymorphism detection (AFLPD), PCR (e.g., long range PCR, or stepwise PCR), allele specific oligonucleotide (ASO) probes, and hybridization to DNA microarrays or beads. For example, genotyping can be performed by sequencing. In some cases, sequencing can be high fidelity sequencing. Methods of sequencing can include Maxam-Gilbert sequencing, chain-termination methods (e.g., Sanger sequencing), shotgun sequencing, and bridge PCR. In some cases, genotyping can be performed by next-generation sequencing. Methods of next-generation sequencing can include massively parallel signature sequencing, colony sequencing, pyrosequencing (e.g., pyrosequencing developed by 454 Life Sciences), single-molecule rea-time sequencing (e.g., by Pacific Biosciences), Ion semiconductor sequencing (e.g., by Ion Torrent semiconductor sequencing), sequencing by synthesis (e.g., by Solexa sequencing by Illumina), sequencing by ligation (e.g., SOLiD sequencing by Applied Biosystems), DNA nanoball sequencing, and heliscope single molecule sequencing. In some cases, genotyping of a non-human animal herein can comprise full genome sequencing analysis. In some cases, knocking out of a gene in an animal can be validated by sequencing (e.g., next-generation sequencing) a part of the gene or the entire gene. For example, knocking out of NLRC5 gene in a pig can be validated by next generation sequencing of the entire NLRC5. The next generation sequencing of NLRC5 can be performed using e.g. using forward primer 5′-gctgtggcatatggcagttc-3′ (SEQ ID No. 1) and reverse primer 5′-tccatgtataagtctttta-3′ (SEQ ID No. 2), or forward primer 5′-ggcaatgccagatcctcaac-3′ (SEQ ID No. 3) and reverse primer 5′-tgtctgatgtctttctcatg-3′ (SEQ ID No. 4).

TABLE 1
Genomic sequences, cDNA and proteins of exemplary disrupted genes*

| | Genomic | | | | |
|---|---|---|---|---|---|
| | sequence | cDNA | | protein | |
| | SEQ ID | SEQ ID | | SEQ ID | |
| Gene | No. | No. | Accession No. | No. | Accession No. |
| NLRC5 | 5 | 6 | KC514136.1 | 7 | AGG68119.1 |
| TAP1 | 8 | 9 | NM_001044581 | 10 | NP_001038046.1 |
| GGTA1 | 11 | 12 | AF221508 | 13 | NP_998975.1 |
| CMAH | 14 | 15 | NM_001113015 | 16 | NP_001106486.1 |
| CXCL10 | 17 | 18 | NM_001008691.1 | 19 | NP_001008691.1 |
| CIITA | 20 | 21 | XM_013995652.1 | 22 | XP_013851106.1 |
| B4GALNT2 | 23 | 24 | NM_001244330.1 | 25 | NP_001231259.1 |
| C3 | 26 | 27 | NM_214009.1 | 28 | NP_999174.1 |
| MICA | 29 | 30 | NM_000247.2 | 31 | NP_000238.1 |
| MICB | 32 | 33 | NM_001289160.1 | 34 | NP_001276089.1 |

*The sequences for Table 1 can be found in Table 18.

[0289] Transgenes

[0290] Transgenes, or exogenous nucleic acid sequences, can be useful for overexpressing endogenous genes at higher levels than without the transgenes. Additionally, exogenous nucleic acid sequences can be used to express exogenous genes. Transgenes can also encompass other types of genes, for example, a dominant negative gene.

[0291] A transgene of protein X can refer to a transgene comprising an exogenous nucleic acid sequence encoding protein X. As used herein, in some cases, a transgene encoding protein X can be a transgene encoding 100% or about 100% of the amino acid sequence of protein X. In some cases, a transgene encoding protein X can encode the full or partial amino sequence of protein X. For example, the transgene can encode at least or at least about 99%, 95%, 90%, 80%, 70%, 60%, 50%, 40%, 30%, 20%, 10%, or 5%, e.g., from or from about 99% to 90%; 90% to 80%; 80% to 70%; 70% to 60%; or 60% to 50%; of the amino acid sequence of protein X. Expression of a transgene can ultimately result in a functional protein, e.g., a partially or fully functional protein. As discussed above, if a partial sequence is expressed, the ultimate result can be in some cases a nonfunctional protein or a dominant negative protein. A nonfunctional protein or dominant negative protein can also compete with a functional (endogenous or exogenous) protein. A transgene can also encode an RNA (e.g., mRNA, shRNA, siRNA, or microRNA). In some cases, where a transgene encodes for an mRNA, this can in turn be translated into a polypeptide (e.g., a protein). Therefore, it is contemplated that a transgene can encode for protein. A transgene can, in some instances, encode a protein or a portion of a protein. Additionally, a protein can have one or more mutations (e.g., deletion, insertion, amino acid replacement, or rearrangement) compared to a wild-type polypeptide. A protein can be a natural polypeptide or an artificial polypeptide (e.g., a recombinant polypeptide). A transgene can encode a fusion protein formed by two or more polypeptides.

[0292] Where a transgene, or exogenous nucleic acid sequence, encodes for an mRNA based on a naturally occurring mRNA (e.g., an mRNA normally found in another species), the mRNA can comprise one or more modifications in the 5′ or 3′ untranslated regions. The one or more modifications can comprise one or more insertions, on or more deletions, or one or more nucleotide changes, or a combination thereof. The one or more modifications can increase the stability of the mRNA. The one or more modifications can remove a binding site for an miRNA molecule, such as an miRNA molecule that can inhibit translation or stimulate mRNA degradation. For example, an mRNA encoding for a HLA-G protein can be modified to remove a biding site for an miR148 family miRNA. Removal of this binding site can increase mRNA stability.

[0293] Transgenes can be placed into an organism, cell, tissue, or organ, in a manner which produces a product of the transgene. For example, disclosed herein is a non-human animal comprising one or more transgenes. One or more transgenes can be in combination with one or more disruptions as described herein. A transgene can be incorporated into a cell. For example, a transgene can be incorporated into an organism's germ line. When inserted into a cell, a transgene can be either a complementary DNA (cDNA) segment, which is a copy of messenger RNA (mRNA), or a gene itself residing in its original region of genomic DNA (with or without introns).

[0294] A transgene can comprise a polynucleotide encoding a protein of a species and expressing the protein in an animal of a different species. For example, a transgene can comprise a polynucleotide encoding a human protein. Such a polynucleotide can be used express the human protein (e.g., CD47) in a non-human animal (e.g., a pig). In some cases, the polynucleotide can be synthetic, e.g., different from any native polynucleotide in sequence and/or chemical characteristics.

[0295] The polynucleotide encoding a protein of species X can be optimized to express the protein in an animal of a species Y. There may be codon usage bias (e.g., differences in the frequency of occurrence of synonymous codons in coding DNA). A codon can be a series of nucleotides (e.g., a series of 3 nucleotides) that encodes a specific amino acid residue in a polypeptide chain or for the termination of translation (stop codons). Different species may have different preference in the DNA codons. The optimized polynucleotide can encode a protein of species X, in some cases with codons of a species Y, so that the polynucleotide can express the protein more efficiently in the species Y, compared to the native gene encoding the protein of species X. In some cases, an optimized polynucleotide can express a protein at least 5%, 10%, 20%, 40%, 80%, 90%, 1.5 folds, 2 folds, 5 folds, or 10 folds more efficiently in species Y than a native gene of species X encoding the same protein.

[0296] Human Leukocyte Antigen G (HLA-G)

[0297] HLA-G can be a potent immuno-inhibitory and tolerogenic molecule. HLA-G expression in a human fetus can enable the human fetus to elude the maternal immune response. Neither stimulatory functions nor responses to allogeneic HLA-G have been reported to date. HLA-G can be a non-classical HLA class I molecule. It can differ from classical MHC class I molecules by its genetic diversity, expression, structure, and function. HLA-G can be characterized by a low allelic polymorphism. Expression of HLA-G can be restricted to trophoblast cells, adult thymic medulla, and stem cells. However, HLA-G neo-expression may be induced in pathological conditions such as cancers, multiple sclerosis, inflammatory diseases, or viral infections.

[0298] Seven isoforms of HLA-G have been identified. The different isoforms can be products of alternative splicing. Four of these can be membrane bound (HLA-G1 to -G4), and 3 can be soluble isoforms (HLA-G5 to -G7). HLA-G1 and HLA-G5 isoforms present the typical structure of the classical HLA class I molecules formed by a 3 globular domain (α1-α3) heavy-chain, noncovalently associated to β-2-microglobulin (B2M) and a nonapeptide. The truncated isoforms lack 1 or 2 domains, although they all contain the al domain, and they are all B2M-free isoforms.

[0299] HLA-G can exerts an immuno-inhibitory function through direct binding to inhibitory receptors, e.g., ILT2/CD85j/LILRB1, ILT4/CD85d/LILRB2, or KIR2DL4/CD158d.

[0300] ILT2 can be expressed by B cells, some T cells, some NK cells, and monocytes/dendritic cells. ILT4 can be myeloid-specific and its expression can be restricted to monocytes/dendritic cells. KIR2DL4 can be a specific receptor for HLA-G. It can be expressed by the CD56^{bright} subset of NK cells. ILT2 and ILT4 receptors can bind a wide range of classical HLA molecules through the α3 domain and B2M. However, HLA-G can be their ligand of highest affinity.

[0301] ILT2-HLA-G interaction can mediate the inhibition of, for example: i) NK and antigen-specific CD8+ T cell cytolytic function, ii) alloproliferative response of CD4+T cells, and iii) maturation and function of dendritic cells. ILT2-HLA-G interaction can impede both naïve and memory B cell function in vitro and in vivo. HLA-G can inhibit B cell proliferation, differentiation, and Ig secretion in both T cell-dependent and -independent models of B cell activation. HLA-G can act as a negative B cell regulator in modulating B cell Ab secretion. HLA-G can also induce the differentiation of regulatory T cells, which can then inhibit allogeneic responses themselves may participate in the tolerance of allografts.

[0302] The expression of HLA-G by tumor cells can enable the escape of immunosurveillance mediated by host T lymphocytes and NK cells. Thus, the expression of HLA-G by malignant cells may prevent tumor immune eradication by inhibiting the activity of tumor-infiltrating NK cells, cytotoxic T lymphocytes (CTLs), and antigen presenting cells (APCs).

[0303] The HLA-G structure variation, particularly its monomeric/multimeric status and its association with B2M, can play a role in the biological function of HLA-G, its regulation and its interactions with the inhibitory receptors ILT2 and ILT4.

[0304] ILT2 and ILT4 inhibitory receptors may have a higher affinity for HLA-G multimers than monomeric structures. HLA-G1 and HLA-G5 (HLA-G1/5) can form dimers through disulphide bonds between unique cysteine residues at positions 42 (Cys42-Cys42), within the al domain. Dimers of B2M-associated HLA-G1 may bind ILT2 and ILT4 with higher affinity than monomers. This increased affinity of dimers may be due to an oblique orientation that exposes the ILT2- and ILT4-binding sites of the α3 domain, making it more accessible to the receptors. Both ILT2 and ILT4 can bind the HLA-G α3 domain at the level of F195 and Y197 residues.

[0305] ILT2 and ILT4 bind differently to their HLA-G isoforms. ILT2 may recognize only B2M-associated HLA-G structures, whereas ILT4 may recognize both B2M-associated and B2M-free HLA-G heavy chains. B2M-free heavy chains have been detected at the cell surface and in culture supernatants of HLA-G-expressing cells. Furthermore, B2M-free HLA-G heavy chains may be the main structure produced by human villous trophoblast cells. The presence of (B2M-free) α1-α3 structures (HLA-G2 and G-6 isoforms) was shown in the circulation of human heart transplant recipients and may be associated with better allograft acceptance. The α1-α3 structure may bind only to ILT4 but not ILT2. However, α1-α3 dimers (with dimerization of α1-α3 monomers achieved through disulfide bonds between two free cysteines in position 42) may be tolerogenic in vivo in an allogeneic murine skin transplantation model. An (α1-α3)×2 synthetic molecule may inhibit the proliferation of tumor cell lines that did not express ILT4. This may indicate the existence of yet unknown receptors for HLA-G.

[0306] Accordingly, in one aspect, disclosed herein are genetically modified non-human animals and cells comprising an exogenous nucleic acid sequence encoding for an HLA-G protein. The genetically modified non-human animals and cells can also comprise one or more additional genetic modifications, such as any of the genetic modifications (e.g., knock-ins, knock-outs, gene disruptions, etc.) disclosed herein. For example, the genetically modified non-human animals and cells can also comprise another exogenous nucleic acid sequence encoding a B2M protein.

[0307] A non-human animal can comprise one or more transgenes comprising one or more polynucleotide inserts. The polynucleotide inserts can encode one or proteins or functional fragments thereof. For example, a non-human genetically modified animal can comprise one or more exogenous nucleic acid sequences encoding one or more proteins or functional fragments thereof. In some cases, a non-human animal can comprise one or more transgenes comprising one or more polynucleotide inserts encoding proteins that can reduce expression and/or function of MHC molecules (e.g., MHC I molecules and/or MHC II molecules). The one or more transgenes can comprise one or more polynucleotide inserts encoding MHC I formation suppressors, regulators of complement activations, inhibitory ligands for NK cells, B7 family members, CD47, serine protease inhibitors, galectins, and/or any fragments thereof. In some cases, the MHC I formation suppressors can be infected cell protein 47 (ICP47). In some cases, regulators of complement activation can comprise cluster of differentiation 46 (CD46), cluster of differentiation 55 (CD55), and cluster of differentiation 59 (CD59). In some cases, inhibitory ligands for NK cells can comprise leukocyte antigen E (HLA-E), human leukocyte antigen G (HLA-G), and β-2-microglobulin (B2M). An inhibitory ligand for NK cells can be an isoform of HLA-G, e.g., HLA-G1, HLA-G2, HLA-G3, HLA-G4, HLA-G5, HLA-G6, or HLA-G7. For example, inhibitory ligand for NK cells can be HLA-G1. A transgene of HLA-G (e.g., HLA-G1, HLA-G2, HLA-G3, HLA-G4, HLA-G5, HLA-G6, or HLA-G7) can refer to a transgene comprising a nucleotide sequence encoding HLA-G (e.g., HLA-G1, HLA-G2, HLA-G3, HLA-G4, HLA-G5, HLA-G6, or HLA-G7). As used herein, in some cases, a transgene encoding HLA-G (e.g., HLA-G1, HLA-G2, HLA-G3, HLA-G4, HLA-G5, HLA-G6, or HLA-G7) can be a transgene encoding 100% or about 100% of the amino acid sequence of HLA-G (e.g., HLA-G1, HLA-G2, HLA-G3, HLA-G4, HLA-G5, HLA-G6, or HLA-G7). In other cases, a transgene encoding HLA-G (e.g., HLA-G1, HLA-G2, HLA-G3, HLA-G4, HLA-G5, HLA-G6, or HLA-G7) can be a transgene encoding the full or partial sequence of HLA-G (e.g., HLA-G1, HLA-G2, HLA-G3, HLA-G4, HLA-G5, HLA-G6, or HLA-G7). For example, the transgene can encode at least or at least about 99%, 95%, 90%, 80%, 70%, 60%, or 50% of the amino acid sequence of HLA-G (e.g., HLA-G1, HLA-G2, HLA-G3, HLA-G4, HLA-G5, HLA-G6, or HLA-G7). For example, the transgene can encode 90% of the HLA-G amino acid sequence. A transgene can comprise polynucleotides encoding a functional (e.g., a partially or fully functional) HLA-G (e.g., HLA-G1, HLA-G2, HLA-G3, HLA-G4, HLA-G5, HLA-G6, or HLA-G7). In some cases, the one or more transgenes can comprise one or more polynucleotide inserts encoding one or more of ICP47, CD46, CD55, CD59, HLA-E, HLA-G (e.g., HLA-G1, HLA-G2, HLA-G3, HLA-G4, HLA-G5, HLA-G6, or HLA-G7), and B2M. The HLA-G genomic DNA sequence can have 8 exons by which alternative splicing results in 7 isoforms. The HLA-G1 isoform can exclude exon 7. The HLA-G2 isoform can exclude exon 3 and 7. Translation of intron 2 or intron 4 can result secreted isoforms due to the loss of the transmembrane domain expression. The maps of the genomic sequence and cDNA of HLA-G are shown in FIGS. 14A-14B. In some cases, B7 family members can comprise CD80, CD86, programmed death-ligand 1 (PD-L1), programmed death-ligand 2 (PD-L2), CD275, CD276, V-set domain containing T cell activation inhibitor 1 (VTCN1), platelet receptor Gi24, natural cytotoxicity triggering receptor 3 ligand 1 (NR3L1), and HERV-H LTR-associating 2 (HHLA2). For example, a B7 family member can be PD-L1 or PD-L2. In some cases, a serine protease inhibitor can be serine protease inhibitor 9 (Spi9). In some cases, galectins can comprise galectin-1, galectin-2, galectin-3, galectin-4, galectin-5, galectin-6, galectin-7, galectin-8, galectin-9, galectin-10, galectin-11, galectin-12, galectin-13, galectin-14, and galectin-15. For example, a galectin can be galectin-9.

[0308] A genetically modified non-human animal can comprise reduced expression of one or more genes and one or more transgenes disclosed herein. In some cases, a genetically modified non-human animal can comprise reduced expression of one or more of NLRC5, TAP1, CXCL10, MICA, MICB, C3, CIITA, GGTA1, CMAH, and B4GALNT2, and one or more transgenes comprising one or more polynucleotide inserts encoding one or more of ICP47, CD46, CD55, CD59, HLA-E, HLA-G (e.g., HLA-G1, HLA-G2, HLA-G3, HLA-G4, HLA-G5, HLA-G6, or HLA-G7), B2M, PD-L1, PD-L2, CD47, Spi9, and galectin-9. In some cases, a genetically modified non-human animal can comprise reduced expression GGTA1, CMAH, and B4GALNT2, and exogenous polynucleotides encoding HLA-G (e.g., HLA-G1, HLA-G2, HLA-G3, HLA-G4, HLA-G5, HLA-G6, or HLA-G7), CD47 (e.g., human CD47), PD-L1 (e.g., human PD-L1), and PD-L2 (e.g., human PD-L2). In some cases, a genetically modified non-human animal can comprise reduced expression GGTA1, CMAH, and B4GALNT2, and exogenous polynucleotides encoding HLA-E, CD47 (e.g., human CD47), PD-L1 (e.g., human PD-L1), and PD-L2 (e.g., human PD-L2). In some cases, a genetically modified non-human animal can comprise reduced expression NLRC5, C3, CXC10, GGTA1, CMAH, and B4GALNT2, and exogenous polynucleotides encoding HLA-G (e.g., HLA-G1, HLA-G2, HLA-G3, HLA-G4, HLA-G5, HLA-G6, or HLA-G7), CD47 (e.g., human CD47), PD-L1 (e.g., human PD-L1), and PD-L2 (e.g., human PD-L2). In some cases, a genetically modified non-human animal can comprise reduced expression TAP1, C3, CXC10GGTA1, CMAH, and B4GALNT2, and exogenous polynucleotides encoding HLA-G (e.g., HLA-G1, HLA-G2, HLA-G3, HLA-G4, HLA-G5, HLA-G6, or HLA-G7), CD47 (e.g., human CD47), PD-L1 (e.g., human PD-L1), and PD-L2 (e.g., human PD-L2). In some cases, a genetically modified non-human animal can comprise reduced expression NLRC5, C3, CXC10, GGTA1, CMAH, and B4GALNT2, and exogenous polynucleotides encoding HLA-E, CD47 (e.g., human CD47), PD-L1 (e.g., human PD-L1), and PD-L2 (e.g., human PD-L2). In some cases, a genetically modified non-human animal can comprise reduced expression TAP1, C3, CXC10, GGTA1, CMAH, and B4GALNT2, and exogenous polynucleotides encoding HLA-E. In some cases, a genetically modified non-human animal can comprise reduced expression of GGTA1 and a transgene comprising one or more polynucleotide inserts encoding HLA-E. In some cases, a genetically modified non-human animal can comprise reduced expression of GGTA1 and a transgene comprising one or more polynucleotide inserts encoding HLA-G (e.g., HLA-G1, HLA-G2, HLA-G3, HLA-G4, HLA-G5, HLA-G6, or HLA-G7). In some cases, a genetically modified non-human animal can comprise a transgene comprising one or more polynucleotide inserts encoding HLA-G (e.g., HLA-G1, HLA-G2, HLA-G3, HLA-G4, HLA-G5, HLA-G6, or HLA-G7) inserted adjacent to a Rosa26 promoter, e.g., a porcine Rosa26 promoter. In some cases, a genetically modified non-human animal can comprise reduced expression of NLRC5, C3, GGTA1, CMAH, and B4GALNT2, and transgenes comprising polynucleotides encoding proteins or functional fragments thereof, where the proteins comprise HLA-G1, Spi9, PD-L1, PD-L2, CD47, and galectin-9. In some cases, a genetically modified non-human animal can comprise reduced expression of TAP1, C3, GGTA1, CMAH, and B4GALNT2, and transgenes comprising polynucleotides encoding proteins or functional fragments thereof, where the proteins comprise HLA-G1, Spi9, PD-L1, PD-L2, CD47, and galectin-9. In some cases, a genetically modified non-human animal can comprise reduced expression of NLRC5, TAP1, C3, GGTA1, CMAH, and B4GALNT2, and transgenes comprising polynucleotides encoding proteins or functional fragments thereof, where the proteins comprise HLA-G1, Spi9, PD-L1, PD-L2, CD47, and galectin-9. In some cases, a genetically modified non-human animal can comprise reduced protein expression of NLRC5, C3, GGTA1, and CXCL10, and transgenes comprising polynucleotides encoding proteins or functional fragments thereof, where the protein comprise HLA-G1 or HLA-E. In some cases, a genetically modified non-human animal can comprise reduced protein expression of TAP1, C3, GGTA1, and CXCL10, and transgenes comprising polynucleotides encoding proteins or functional fragments thereof, where the protein comprise HLA-G1 or HLA-E. In some cases, a genetically modified non-human animal can comprise reduced protein expression of NLRC5, TAP1, C3, GGTA1, and CXCL10, and transgenes comprising polynucleotides encoding proteins or functional fragments thereof, where the protein comprise HLA-G1 or HLA-E. In some cases, CD47, PD-L1, and PD-L2 encoded by the transgenes herein can be human CD47, human PD-L1 and human PD-L2.

[0309] A genetically modified non-human animal can comprise a transgene inserted in a locus in the genome of the animal. In some cases, a transgene can be inserted adjacent to the promoter of or inside a targeted gene. In some cases, insertion of the transgene can reduce the expression of the targeted gene. The targeted gene can be a gene whose expression is reduced disclosed herein. For example, a transgene can be inserted adjacent to the promoter of or inside one or more of NLRC5, TAP1, CXCL10, MICA, MICB, C3, CIITA, GGTA1, CMAH, and B4GALNT2. In some cases, a transgene can be inserted adjacent to the promoter of or inside GGTA1. In some cases, a transgene (e.g., a CD47 transgene) can be inserted adjacent to a promoter that allows the transgene to selectively expression in certain types of cells. For example, a CD47 transgene can be inserted adjacent to promoter that allows the CD47 transgene to selectively express in blood cells and splenocytes. One of such promoters can be GGTA1 promoters.

[0310] For example, a non-human animal can comprise one or more transgenes (e.g., exogenous nucleic acid sequences) comprising one or more polynucleotide inserts of Infected cell protein 47 (ICP47), Cluster of differentiation 46 (CD46), Cluster of differentiation 55 (CD55), Cluster of differentiation 59 (CD 59), HLA-E, HLA-G (e.g., HLA-G1, HLA-G2, HLA-G3, HLA-G4, HLA-G5, HLA-G6, or HLA-G7), B2M, Spi9, PD-L1, PD-L2, CD47, galectin-9, any functional fragments thereof, or any combination thereof. Polynucleotide encoding for ICP47, CD46, CD55, CD59, HLA-E, HLA-G (e.g., HLA-G1, HLA-G2, HLA-G3, HLA-G4, HLA-G5, HLA-G6, or HLA-G7), or B2M can encode one or more of ICP47, CD46, CD55, CD59, HLA-E, HLA-G (e.g., HLA-G1, HLA-G2, HLA-G3, HLA-G4, HLA-G5, HLA-G6, or HLA-G7), B2M, Spi9, PD-L1, PD-L2, CD47, or galectin-9 human proteins. A non-human animal can comprise 1, 2, 3, 4, 5, 6, 7, 8, 9, 10, 11, 12, 13, 14, 15, 16, 17, 18, 19, 20, or more transgenes. For example, a non-human animal can comprise one or more transgene comprising ICP47, CD46, CD55, CD59, HLA-E, HLA-G (e.g., HLA-G1, HLA-G2, HLA-G3, HLA-G4, HLA-G5, HLA-G6, or HLA-G7), B2M, Spi9, PD-L1, PD-L2, CD47, galectin-9, any functional fragments thereof, or any combination thereof. A non-human animal can also comprise a single transgene encoding ICP47. A non-human animal can sometimes comprise a single transgene encoding CD59. A non-human animal can sometimes comprise a single transgene encoding HLA-G (e.g., HLA-G1, HLA-G2, HLA-G3, HLA-G4, HLA-G5, HLA-G6, or HLA-G7). A non-human animal can sometimes comprise a single transgene encoding HLA-E. A non-human animal can sometimes comprise a single transgene encoding B2M. A non-human animal can also comprise two or more transgenes, where the two or more transgenes are ICP47, CD46, CD55, CD59, and/or any combination thereof. For example, two or more transgenes can comprise CD59 and CD46 or CD59 and CD55. A non-human animal can also comprise three or more transgenes, where the three or more transgenes can comprise ICP47, CD46, CD55, CD59, or any combination thereof. For example, three or more transgenes can comprise CD59, CD46, and CD55. A non-human animal can also comprise four or more transgenes, where the four or more transgenes can comprise ICP47, CD46, CD55, and CD59. A non-human animal can comprise four or more transgenes comprising ICP47, CD46, CD55, and CD59.

[0311] A combination of transgenes and gene disruptions can be used. A non-human animal can comprise one or more reduced genes and one or more transgenes. For example, one or more genes whose expression is reduced can comprise any one of NLRC5, TAP1, GGTA1, B4GALNT2, CMAH, CXCL10, MICA, MICB, C3, CIITA, and/or any combination thereof, and one or more transgene can comprise ICP47, CD46, CD55, CD 59, any functional fragments thereof, and/or any combination thereof. For example, solely to illustrate various combinations, one or more genes whose expression is disrupted can comprise NLRC5 and one or more transgenes comprise ICP47. One or more genes whose expression is disrupted can also comprise TAP1, and one or more transgenes comprise ICP47. One or more genes whose expression is disrupted can also comprise NLRC5 and TAP1, and one or more transgenes comprise ICP47. One or more genes whose expression is disrupted can also comprise NLRC5, TAP1, and GGTA1, and one or more transgenes comprise ICP47. One or more genes whose expression is disrupted can also comprise NLRC5, TAP1, B4GALNT2, and CMAH, and one or more transgenes comprise ICP47. One or more genes whose expression is disrupted can also comprise NLRC5, TAP1, GGTA1, B4GALNT2, and CMAH, and one or more transgenes comprise ICP47. One or more genes whose expression is disrupted can also comprise NLRC5 and one or more transgenes comprise CD59. One or more genes whose expression is disrupted can also comprise TAP1, and one or more transgenes comprise CD59. One or more genes whose expression is disrupted can also comprise NLRC5 and TAP1, and one or more transgenes comprise CD59. One or more genes whose expression is disrupted can also comprise NLRC5, TAP1, and GGTA1, and one or more transgenes comprise CD59. One or more genes whose expression is disrupted can also comprise NLRC5, TAP1, B4GALNT2, and CMAH, and one or more transgenes comprise CD59. One or more genes whose expression is disrupted can also comprise NLRC5, TAP1, GGTA1, B4GALNT2, and CMAH, and one or more transgenes comprise CD59.

[0312] In some cases, a first exon of a gene is genetically modified. For example, one or more first exons of a gene that can be genetically modified can be a gene selected from a group consisting of NLRC5, TAP1, GGTA1, B4GALNT2, CMAH, CXCL10, MICA, MICB, C3, CIITA, and any combination thereof. For example, FIG. 112 A shows a guide RNA targeted a first exon of an NLCR5 gene. In other cases, a second exon of a gene is targeted. For example, FIG. 105, FIG. 106, and FIG. 107 show relevant sequences for primer pairs to generate first and second exon targeting guide RNAs as well as primer sequences to determine genetic modification by sequencing.

[0313] Transgenes that can be used and are specifically contemplated can include those genes that exhibit a certain identity and/or homology to genes disclosed herein, for example, ICP47, CD46, CD55, CD59, HLA-E, HLA-G (e.g., HLA-G1, HLA-G2, HLA-G3, HLA-G4, HLA-G5, HLA-G6, or HLA-G7), B2M, Spi9, PD-L1, PD-L2, CD47, galectin-9, any functional fragments thereof, and/or any combination thereof. Therefore, it is contemplated that if gene that exhibits at least or at least about 60%, 70%, 80%, 90%, 95%, 98%, or 99% homology, e.g., at least or at least about 99% to 90%; 90% to 80%; 80% to 70%; 70% to 60% homology; (at the nucleic acid or protein level), it can be used as a transgene. It is also contemplated that a gene that exhibits at least or at least about 60%, 65%, 70%, 75%, 80%, 85%, 90%, 95%, 98%, or 99%, identity e.g., at least or at least about 99% to 90%; 90% to 80%; 80% to 70%; 70% to 60% identity; (at the nucleic acid or protein level) can be used as a transgene.

[0314] A non-human animal can also comprise 1, 2, 3, 4, 5, 6, 7, 8, 9, 10, 11, 12, 13, 14, 15, 16, 17, 18, 19, 20, or more dominant negative transgenes. Expression of a dominant negative transgenes can suppress expression and/or function of a wild type counterpart of the dominant negative transgene. Thus, for example, a non-human animal comprising a dominant negative transgene X, can have similar phenotypes compared to a different non-human animal comprising an X gene whose expression is reduced. One or more dominant negative transgenes can be dominant negative NLRC5, dominant negative TAP1, dominant negative GGTA1, dominant negative CMAH, dominant negative B4GALNT2, dominant negative CXCL10, dominant negative MICA, dominant negative MICB, dominant negative CIITA, dominant negative C3, or any combination thereof.

[0315] Also provided is a non-human animal comprising one or more transgenes that encodes one or more nucleic acids that can suppress genetic expression, e.g., can knockdown a gene. RNAs that suppress genetic expression can comprise, but are not limited to, shRNA, siRNA, RNAi, and microRNA. For example, siRNA, RNAi, and/or microRNA can be given to a non-human animal to suppress genetic expression. Further, a non-human animal can comprise one or more transgene encoding shRNAs. shRNA can be specific to a particular gene. For example, a shRNA can be specific to any gene described in the application, including but not limited to, NLRC5, TAP1, GGTA1, B4GALNT2, CMAH, CXCL10, MICA, MICB, B4GALNT2, CIITA, C3, and/or any combination thereof.

[0316] When transplanted to a subject, cells, tissues, or organs from the genetically modified non-human animal can trigger lower immune responses (e.g., transplant rejection) in the subject compared to cells, tissues, or organs from a non-genetically modified counterpart. In some cases, the immune responses can include the activation, proliferation and cytotoxicity of T cells (e.g., CD8+ T cells and/or CD4+ T cells) and NK cells. Thus, phenotypes of genetically modified cells disclosed herein can be measured by co-culturing the cells with NK cells, T cells (e.g., CD8+ T cells or CD4+ T cells), and testing the activation, proliferation and cytotoxicity of the NK cells or T cells. In some cases, the T cells or NK cells activation, proliferation and cytotoxicity induced by the genetically modified cells can be lower than that induced by non-genetically modified cells. In some cases, phenotypes of genetically modified cells herein can be measured by Enzyme-Linked ImmunoSpot (ELISPOT) assays.

[0317] One or more transgenes can be from different species. For example, one or more transgenes can comprise a human gene, a mouse gene, a rat gene, a pig gene, a bovine gene, a dog gene, a cat gene, a monkey gene, a chimpanzee gene, or any combination thereof. For example, a transgene can be from a human, having a human genetic sequence. One or more transgenes can comprise human genes. In some cases, one or more transgenes are not adenoviral genes.

[0318] A transgene can be inserted into a genome of a non-human animal in a random or site-specific manner. For example, a transgene can be inserted to a random locus in a genome of a non-human animal. These transgenes can be fully functional if inserted anywhere in a genome. For instance, a transgene can encode its own promoter or can be inserted into a position where it is under the control of an endogenous promoter. Alternatively, a transgene can be inserted into a gene, such as an intron of a gene or an exon of a gene, a promoter, or a non-coding region. A transgene can be integrated into a first exon of a gene.

[0319] Sometimes, more than one copy of a transgene can be inserted into more than a random locus in a genome. For example, multiple copies can be inserted into a random locus in a genome. This can lead to increased overall expression than if a transgene was randomly inserted once. Alternatively, a copy of a transgene can be inserted into a gene, and another copy of a transgene can be inserted into a different gene. A transgene can be targeted so that it could be inserted to a specific locus in a genome of a non-human animal.

[0320] Expression of a transgene can be controlled by one or more promoters. A promoter can be a ubiquitous, tissue-specific promoter or an inducible promoter. Expression of a transgene that is inserted adjacent to a promoter can be regulated. For example, if a transgene is inserted near or next to a ubiquitous promoter, the transgene will be expressed in all cells of a non-human animal. Some ubiquitous promoters can be a CAGGS promoter, an hCMV promoter, a PGK promoter, an SV40 promoter, or a Rosa26 promoter.

[0321] A promoter can be endogenous or exogenous. For example, one or more transgenes can be inserted adjacent to an endogenous or exogenous Rosa26 promoter. Further, a promoter can be specific to a non-human animal. For example, one or more transgenes can be inserted adjacent to a porcine Rosa26 promoter.

[0322] Tissue specific promoter (which can be synonymous with cell-specific promoters) can be used to control the location of expression. For example, one or more transgenes can be inserted adjacent to a tissue-specific promoter. Tissue-specific promoters can be a FABP promoter, a Lck promoter, a CamKII promoter, a CD19 promoter, a Keratin promoter, an Albumin promoter, an aP2 promoter, an insulin promoter, an MCK promoter, an MyHC promoter, a WAP promoter, or a Col2A promoter. For example, a promoter can be a pancreas-specific promoter, e.g., an insulin promoter.

[0323] Inducible promoters can be used as well. These inducible promoters can be turned on and off when desired, by adding or removing an inducing agent. It is contemplated that an inducible promoter can be a Lac, tac, trc, trp, araBAD, phoA, recA, proU, cst-1, tetA, cadA, nar, PL, cspA, T7, VHB, Mx, and/or Trex.

[0324] A non-human animal or cells as described herein can comprise a transgene encoding insulin. A transgene encoding insulin can be a human gene, a mouse gene, a rat gene, a pig gene, a cattle gene, a dog gene, a cat gene, a monkey gene, a chimpanzee gene, or any other mammalian gene. For example, a transgene encoding insulin can be a human gene. A transgene encoding insulin can also be a chimeric gene, for example, a partially human gene.

[0325] Expression of transgenes can be measured by detecting the level of transcripts of the transgenes. For example, expression of transgenes can be measured by Northern blotting, nuclease protection assays (e.g., RNase protection assays), reverse transcription PCR, quantitative PCR (e.g., real-time PCR such as real-time quantitative reverse transcription PCR), in situ hybridization (e.g., fluorescent in situ hybridization (FISH)), dot-blot analysis, differential display, Serial analysis of gene expression, subtractive hybridization, microarrays, nanostring, and/or sequencing (e.g., next-generation sequencing). In some cases, expression of transgenes can be measured by detecting proteins encoded by the genes. For example, expression of one or more genes can be measured by protein immunostaining, protein immunoprecipitation, electrophoresis (e.g., SDS-PAGE), Western blotting, bicinchoninic acid assay, spectrophotometry, mass spectrometry, enzyme assays (e.g., enzyme-linked immunosorbent assays), immunohistochemistry, flow cytometry, and/or immunocytochemistry. In some cases, expression of transgenes can be measured by microscopy. The microscopy can be optical, electron, or scanning probe microscopy. In some cases, optical microscopy comprises use of bright field, oblique illumination, cross-polarized light, dispersion staining, dark field, phase contrast, differential interference contrast, interference reflection microscopy, fluorescence (e.g., when particles, e.g., cells, are immunostained), confocal, single plane illumination microscopy, light sheet fluorescence microscopy, deconvolution, or serial time-encoded amplified microscopy.

[0326] Insertion of transgenes can be validated by genotyping. Methods for genotyping can include sequencing, restriction fragment length polymorphism identification (RFLPI), random amplified polymorphic detection (RAPD), amplified fragment length polymorphism detection (AFLPD), PCR (e.g., long range PCR, or stepwise PCR), allele specific oligonucleotide (ASO) probes, and hybridization to DNA microarrays or beads. In some cases, genotyping can be performed by sequencing. In some cases, sequencing can be high fidelity sequencing. Methods of sequencing can include Maxam-Gilbert sequencing, chain-termination methods (e.g., Sanger sequencing), shotgun sequencing, and bridge PCR. In some cases, genotyping can be performed by next-generation sequencing. Methods of next-generation sequencing can include massively parallel signature sequencing, colony sequencing, pyrosequencing (e.g., pyrosequencing developed by 454 Life Sciences), single-molecule rea-time sequencing (e.g., by Pacific Biosciences), Ion semiconductor sequencing (e.g., by Ion Torrent semiconductor sequencing), sequencing by synthesis (e.g., by Solexa sequencing by Illumina), sequencing by ligation (e.g., SOLiD sequencing by Applied Biosystems), DNA nanoball sequencing, and heliscope single molecule sequencing. In some cases, genotyping of a non-human animal herein can comprise full genome sequencing analysis.

[0327] In some cases, insertion of a transgene in an animal can be validated by sequencing (e.g., next-generation sequencing) a part of the transgene or the entire transgene. For example, insertion of a transgene adjacent to a Rosa26 promoter in a pig can be validated by next generation sequencing of Rosa exons 1 to 4, e.g., using the forward primer 5′-cgcctagagaagaggctgtg-3′ (SEQ ID No. 35), and reverse primer 5′-ctgctgtggctgtggtgtag-3′ (SEQ ID No. 36).

TABLE 2
cDNA sequences of exemplary transgenes*

| SEQ ID | | |
|---|---|---|
| No. | Gene | Accession No. |
| 37 | CD46 | NM_213888 |
| 38 | CD55 | AF228059.1 |
| 39 | CD59 | AF020302 |
| 40 | ICP47 | EU445532.1 |
| 41 | HLA-G1 | NM_002127.5 |
| 42 | HLA-E | NM_005516.5 |
| 43 | Human β-2- | NM_004048.2 |
| | microglobulin | |
| 44 | Human PD-L1 | NM_001267706.1 |
| 45 | Human PD-L2 | NM_025239.3 |
| 46 | Human Spi9 | NM_004155.5 |
| 47 | Human CD47 | NM_001777.3 |
| 48 | Human galectin-9 | NM_009587.2 |

*The sequences for Table 2 can be found in Table 18.

TABLE 3
Sequences of proteins encoded by exemplary transgenes*

| SEQ ID | | |
|---|---|---|
| No. | Protein | Accession No. |
| 49 | CD46 | NP_999053.1 |
| 50 | CD55 | AAG14412.1 |
| 51 | CD59 | AAC67231.1 |
| 52 | ICP47 | ACA28836.1 |
| 53 | HLA-G1 | NP_002118.1 |
| 54 | HLA-E | NP_005507.3 |
| 55 | Human β-2- | NP_004039.1 |
| | microglobulin | |
| 56 | Human PD-L1 | NP_001254635.1 |
| 57 | Human PD-L2 | NP_079515.2 |
| 58 | Human Spi9 | NP_004146.1 |
| 59 | Human CD47 | NP_001768.1 |
| 60 | Human galectin-9 | NP_033665.1 |

*The sequences for Table 3 can be found in Table 18.

[0328] Populations of Non-Human Animals

[0329] Provided herein is a single non-human animal and also a population of non-human animals. A population of non-human animals can be genetically identical. A population of non-human animals can also be phenotypical identical. A population of non-human animals can be both phenotypical and genetically identical.

[0330] Further provided herein is a population of non-human animals, which can be genetically modified. For example, a population can comprise at least or at least about 2, 5, 10, 50, 100, or 200, non-human animals as disclosed herein. The non-human animals of a population can have identical phenotypes. For example, the non-human animals of a population can be clones. A population of non-human animal can have identical physical characteristics. The non-human animals of a population having identical phenotypes can comprise a same transgene(s). The non-human animals of a population having identical phenotypes can also comprise a same gene(s) whose expression is reduced. The non-human animals of a population having identical phenotypes can also comprise a same gene(s) whose expression is reduced and comprise a same transgene(s). A population of non-human animals can comprise at least or at least about 2, 5, 10, 50, 100, or 200, non-human animals having identical phenotypes. For example, the phenotypes of any particular litter can have the identical phenotype (e.g., in one example, anywhere from 1 to about 20 non-human animals). The non-human animals of a population can be pigs having identical phenotypes.

[0331] The non-human animals of a population can have identical genotypes. For example, all nucleic acid sequences in the chromosomes of non-human animals in a population can be identical. The non-human animals of a population having identical genotypes can comprise a same transgene(s). The non-human animals of a population having identical genotypes can also comprise a same gene(s) whose expression is reduced. The non-human animals of a population having identical genotypes can also comprise a same gene(s) whose expression is reduced and comprise a same transgene(s). A population of non-human animals can comprise at least or at least about 2, 5, 50, 100, or 200 non-human animals having identical genotypes. The non-human animals of a population can be pigs having identical genotypes.

[0332] Cells from two or more non-human animals with identical genotypes and/or phenotypes can be used in a tolerizing vaccine. In some cases, a tolerizing vaccine disclosed herein can comprise a plurality of the cells (e.g., genetically modified cells) from two or more non-human animals (e.g., pigs) with identical genotypes and/or phenotypes. A method for immunotolerizing a recipient to a graft can comprise administering to the recipient a tolerizing vaccine comprising a plurality of cells (e.g., genetically modified cells) from two or more non-human animals with identical genotypes or phenotypes.

[0333] Cells from two or more non-human animals with identical genotypes and/or phenotypes can be used in transplantation. In some cases, a graft (e.g., xenograft or allograft) can comprise a plurality of cells from two or more non-human animals with identical genotypes and/or phenotypes. In embodiments of the methods described herein, e.g., a method for treating a disease in a subject in need thereof, can comprise transplanting a plurality of cells (e.g., genetically modified cells) from two or more non-human animals with identical genotypes and/or phenotypes.

[0334] Populations of non-human animals can be generated using any method known in the art. In some cases, populations of non-human animals can be generated by breeding. For example, inbreeding can be used to generate a phenotypically or genetically identical non-human animal or population of non-human animals. Inbreeding, for example, sibling to sibling or parent to child, or grandchild to grandparent, or great grandchild to great grandparent, can be used. Successive rounds of inbreeding can eventually produce a phenotypically or genetically identical non-human animal. For example, at least or at least about 2, 3, 4, 5, 10, 20, 30, 40, or 50 generations of inbreeding can produce a phenotypically and/or a genetically identical non-human animal. It is thought that after 10-20 generations of inbreeding, the genetic make-up of a non-human animal is at least 99% pure. Continuous inbreeding can lead to a non-human animal that is essentially isogenic, or close to isogenic as a non-human animal can be without being an identical twin.

[0335] Breeding can be performed using non-human animals that have the same genotype. For example, the non-human animals have the same gene(s) whose expression is reduced and/or carry the same transgene(s). Breeding can also be performed using non-human animals having different genotypes. Breeding can be performed using a genetically modified non-human animal and non-genetically modified non-human animal, for example, a genetically modified female pig and a wild-type male pig, or a genetically modified male pig and a wild-type female pig. All these combinations of breeding can be used to produce a non-human animal of desire.

[0336] Populations of genetically modified non-human animals can also be generated by cloning. For example, the populations of genetically modified non-human animal cells can be asexually producing similar populations of genetically or phenotypically identical individual non-human animals. Cloning can be performed by various methods, such as twinning (e.g., splitting off one or more cells from an embryo and grow them into new embryos), somatic cell nuclear transfer, or artificial insemination. More details of the methods are provided throughout the disclosure.

[0337] II. Genetically Modified Cells

[0338] Disclosed herein are one or more genetically modified cells that can be used to treat or prevent disease. These genetically modified cells can be from genetically modified non-human animals. For example, genetically modified non-human animals as disclosed above can be processed so that one or more cells are isolated to produce isolated genetically modified cells. These isolated cells can also in some cases be further genetically modified cells. However, a cell can be modified ex vivo, e.g., outside an animal using modified or non-modified human or non-human animal cells. For example, cells (including human and non-human animal cells) can be modified in culture. It is also contemplated that a genetically modified cell can be used to generate a genetically modified non-human animal described herein. In some cases, the genetically modified cell can be isolated from a genetically modified animal. In some cases, the genetically modified cell can be derived from a cell from a non-genetically modified animal. Isolation of cells can be performed by methods known in the art, including methods of primary cell isolation and culturing. It is specifically contemplated that a genetically modified cell is not extracted from a human.

[0339] Therefore, anything that can apply to the genetically modified non-human animals including the various methods of making as described throughout can also apply herein. For example, all the genes that are disrupted and the transgenes that are overexpressed are applicable in making genetically modified cells used herein. Further, any methods for testing the genotype and expression of genes in the genetically modified non-human animals described throughout can be used to test the genetic modification of the cells.

[0340] A genetically modified cell can be from a member of the Laurasiatheria superorder or a non-human primate. Such genetically modified cell can be isolated from a member of the Laurasiatheria superorder or a non-human primate. Alternatively, such genetically modified cell can be originated from a member of the Laurasiatheria superorder or a non-human primate. For example, the genetically modified cell can be made from a cell isolated from a member of the Laurasiatheria superorder or a non-human primate, e.g., using cell culturing or genetic modification methods.

[0341] Genetically modified cells, e.g., cells from a genetically modified animal or cells made ex vivo, can be analyzed and sorted. In some cases, genetically modified cells can be analyzed and sorted by flow cytometry, e.g., fluorescence-activated cell sorting. For example, genetically modified cells expressing a transgene can be detected and purified from other cells using flow cytometry based on a label (e.g., a fluorescent label) recognizing the polypeptide encoded by the transgene.

[0342] In some cases, genetically modified cells can reduce, inhibit, or eliminate an immune response. For example, a genetic modification can decrease cellular effector function, decrease proliferation, decrease, persistence, and/or reduce expression of cytolytic effector molecules such as Granzyme B and CD107alpha in an immune cell. An immune cell can be a monocyte and/or macrophage. In some cases, T cell-derived cytokines, such as IFN-g, can activate macrophages via secretion of IFN-gamma. In some cases, T cell activation is inhibited and may cause a macrophage to also be inhibited.

[0343] Stem cells, including, non-human animal and human stem cells can be used. Stem cells do not have the capability to generating a viable human being. For example, stem cells can be irreversibly differentiated so that they are unable to generate a viable human being. Stem cells can be pluripotent, with the caveat that the stem cells cannot generate a viable human.

[0344] As discussed above in the section regarding the genetically modified non-human animals, the genetically modified cells can comprise one or more genes whose expression is reduced. The same genes as disclosed above for the genetically modified non-human animals can be disrupted. For example, a genetically modified cell comprising one or more genes whose expression is disrupted, e.g., reduced, where the one or more genes comprise NLRC5, TAP1, GGTA1, B4GALNT2, CMAH, CXCL10, MICA, MICB, C3, CIITA and/or any combination thereof. Further, the genetically modified cell can comprise one or more transgenes comprising one or more polynucleotide inserts. For example, a genetically modified cell can comprise one or more transgenes comprising one or more polynucleotide inserts of ICP47, CD46, CD55, CD 59, HLA-E, HLA-G (e.g., HLA-G1, HLA-G2, HLA-G3, HLA-G4, HLA-G5, HLA-G6, or HLA-G7), B2M, Spi9, PD-L1, PD-L2, CD47, galectin-9, any functional fragments thereof, or any combination thereof. A genetically modified cell can comprise one or more reduced genes and one or more transgenes. For example, one or more genes whose expression is reduced can comprise any one of NLRC5, TAP1, GGTA1, B4GALNT2, CMAH, CXCL10, MICA, MICB, CIITA, and/or any combination thereof, and one or more transgene can comprise ICP47, CD46, CD55, CD 59, HLA-E, HLA-G (e.g., HLA-G1, HLA-G2, HLA-G3, HLA-G4, HLA-G5, HLA-G6, or HLA-G7), B2M, Spi9, PD-L1, PD-L2, CD47, galectin-9, any functional fragments thereof, and/or any combination thereof. In some cases, a genetically modified cell can comprise reduced expression of NLRC5, C3, GGTA1, CMAH, and B4GALNT2, and transgenes comprising polynucleotides encoding proteins or functional fragments thereof, where the proteins comprise HLA-G1, Spi9, PD-L1, PD-L2, CD47, and galectin-9. In some cases, a genetically modified cell can comprise reduced expression of TAP1, C3, GGTA1, CMAH, and B4GALNT2, and transgenes comprising polynucleotides encoding proteins or functional fragments thereof, where the proteins comprise HLA-G1, Spi9, PD-L1, PD-L2, CD47, and galectin-9. In some cases, a genetically modified cell can comprise reduced expression of NLRC5, TAP1, C3, GGTA1, CMAH, and B4GALNT2, and transgenes comprising polynucleotides encoding proteins or functional fragments thereof, where the proteins comprise HLA-G1, Spi9, PD-L1, PD-L2, CD47, and galectin-9. In some cases, CD47, PD-L1, and PD-L2 encoded by the transgenes herein can be human CD47, human PD-L1 and human PDO-L2. In some cases, the genetically modified cell can be coated with CD47 on its surface. Coating of CD47 on the surface of a cell can be accomplished by biotinylating the cell surface followed by incubating the biotinylated cell with a streptavidin-CD47 chimeric protein. The coated CD47 can be human CD47.

[0345] As discussed above in the section regarding the genetically modified non-human animals, the genetically modified cell can comprise 1, 2, 3, 4, 5, 6, 7, 8, 9, 10, 11, 12, 13, 14, 15, 16, 17, 18, 19, 20 or more disrupted genes. A genetically modified cell can also comprise 1, 2, 3, 4, 5, 6, 7, 8, 9, 10, 11, 12, 13, 14, 15, 16, 17, 18, 19, 20, or more transgenes.

[0346] As discussed in detail above, a genetically modified cell, e.g., porcine cell, can also comprise dominant negative transgenes and/or transgenes expressing one or more knockdown genes. Also as discussed above, expression of a transgene can be controlled by one or more promoters.

[0347] A genetically modified cell can be one or more cells from tissues or organs, the tissues or organs including brain, lung, liver, heart, spleen, pancreas, small intestine, large intestine, skeletal muscle, smooth muscle, skin, bones, adipose tissues, hairs, thyroid, trachea, gall bladder, kidney, ureter, bladder, aorta, vein, esophagus, diaphragm, stomach, rectum, adrenal glands, bronchi, ears, eyes, retina, genitals, hypothalamus, larynx, nose, tongue, spinal cord, or ureters, uterus, ovary and testis. For example, a genetically modified cell, e.g., porcine cell, can be from brain, heart, liver, skin, intestine, lung, kidney, eye, small bowel, or pancreas. In some cases, a genetically modified cell can be from a pancreas. More specifically, pancreas cells can be islet cells. Further, one or more cells can be pancreatic α cells, pancreatic β cells, pancreatic δ cells, pancreatic F cells (e.g., PP cells), or pancreatic ε cells. For example, a genetically modified cell can be pancreatic β cells. Tissues or organs disclosed herein can comprise one or more genetically modified cells. The tissues or organs can be from one or more genetically modified animals described in the application, e.g., pancreatic tissues such as pancreatic islets from one or more genetically modified pigs.

[0348] A genetically modified cell, e.g., porcine cell, can comprise one or more types of cells, where the one or more types of cells include Trichocytes, keratinocytes, gonadotropes, corticotropes, thyrotropes, somatotropes, lactotrophs, chromaffin cells, parafollicular cells, glomus cells melanocytes, nevus cells, Merkel cells, odontoblasts, cementoblasts corneal keratocytes, retina Muller cells, retinal pigment epithelium cells, neurons, glias (e.g., oligodendrocyte astrocytes), ependymocytes, pinealocytes, pneumocytes (e.g., type I pneumocytes, and type II pneumocytes), clara cells, goblet cells, G cells, D cells, ECL cells, gastric chief cells, parietal cells, foveolar cells, K cells, D cells, I cells, goblet cells, paneth cells, enterocytes, microfold cells, hepatocytes, hepatic stellate cells (e.g., Kupffer cells from mesoderm), cholecystocytes, centroacinar cells, pancreatic stellate cells, pancreatic α cells, pancreatic β cells, pancreatic δ cells, pancreatic F cells (e.g., PP cells), pancreatic ε cells, thyroid (e.g., follicular cells), parathyroid (e.g., parathyroid chief cells), oxyphil cells, urothelial cells, osteoblasts, osteocytes, chondroblasts, chondrocytes, fibroblasts, fibrocytes, myoblasts, myocytes, myosatellite cells, tendon cells, cardiac muscle cells, lipoblasts, adipocytes, interstitial cells of cajal, angioblasts, endothelial cells, mesangial cells (e.g., intraglomerular mesangial cells and extraglomerular mesangial cells), juxtaglomerular cells, macula densa cells, stromal cells, interstitial cells, telocytes simple epithelial cells, podocytes, kidney proximal tubule brush border cells, sertoli cells, leydig cells, granulosa cells, peg cells, germ cells, spermatozoon ovums, lymphocytes, myeloid cells, endothelial progenitor cells, endothelial stem cells, angioblasts, mesoangioblasts, and pericyte mural cells. A genetically modified cell can potentially be any cells used in cell therapy. For example, cell therapy can be pancreatic β cells supplement or replacement to a disease such as diabetes.

[0349] A genetically modified cell, e.g., porcine cell, can be from (e.g., extracted from) a non-human animal. One or more cells can be from a mature adult non-human animal. However, one or more cells can be from a fetal or neonatal tissue.

[0350] Depending on the disease, one or more cells can be from a transgenic non-human animal that has grown to a sufficient size to be useful as an adult donor, e.g., an islet cell donor. In some cases, non-human animals can be past weaning age. For example, non-human animals can be at least or at least about six months old. In some cases, non-human animals can be at least or at least about 18 months old. A non-human animal in some cases, survive to reach breeding age. For example, islets for xenotransplantation can be from neonatal (e.g., age 3-7 days) or preweaning (e.g., age 14 to 21 days) donor pigs. One or more genetically modified cells, e.g., porcine cells, can be cultured cells. For example, cultured cells can be from wild-type cells or from genetically modified cells (as described herein). Furthermore, cultured cells can be primary cells. Primary cells can be extracted and frozen, e.g., in liquid nitrogen or at −20° C. to −80° C. Cultured cells can also be immortalized by known methods, and can be frozen and stored, e.g., in liquid nitrogen or at −20° C. to −80° C.

[0351] Genetically modified cells, e.g., porcine cells, as described herein can have a lower risk of rejection, when compared to when a wild-type non-genetically modified cell is transplanted.

[0352] Disclosed herein is a vector comprising a polynucleotide sequence of ICP47, CD46, CD55, CD59, HLA-E, HLA-G (e.g., HLA-G1, HLA-G2, HLA-G3, HLA-G4, HLA-G5, HLA-G6, or HLA-G7), B2M, Spi9, PD-L1, PD-L2, CD47, galectin-9, any functional fragments thereof, or any combination thereof. These vectors can be inserted into a genome of a cell (by transfection, transformation, viral delivery, or any other known method). These vectors can encode ICP47, CD46, CD55, CD59, HLA-E, HLA-G (e.g., HLA-G1, HLA-G2, HLA-G3, HLA-G4, HLA-G5, HLA-G6, or HLA-G7), B2M Spi9, PD-L1, PD-L2, CD47, and/or galectin-9 proteins or functional fragments thereof.

[0353] Vectors contemplated include, but not limited to, plasmid vectors, artificial/mini-chromosomes, transposons, and viral vectors. Further disclosed herein is an isolated or synthetic nucleic acid comprising an RNA, where the RNA is encoded by any sequence in Table 2. RNA can also encode for any sequence that exhibits at least or at least about 50%, 60%, 70%, 80%, 90%, 95%, 99%, or 100% homology to any sequence in Table 2. RNA can also encode for any sequence that exhibits at least or at least about 50%, 60%, 70%, 80%, 90%, 95%, 99%, or 100% identity to any sequence in Table 2.

[0354] RNA can be a single-chain guide RNA. The disclosure also provides an isolated or synthesized nucleic acid comprising any sequence in Table 1. RNA can also provide an isolated or synthesized nucleic acid that exhibits at least or at least about 50%, 60%, 70%, 80%, 90%, 95%, 99%, or 100% homology to any sequence in Table 1. RNA can also provide an isolated or synthesized nucleic acid that exhibits at least or at least about 50%, 60%, 70%, 80%, 90%, 95%, 99%, or 100% identity to any sequence in Table 1.

[0355] Guide RNA sequences can be used in targeting one or more genes in a genome of a non-human animal. For example, guide RNA sequence can target a single gene in a genome of non-human animal. In some cases, guide RNA sequences can target one or more target sites of each of one or more genes in a genome of a non-human animal.

[0356] Genetically modified cells can also be leukocytes, lymphocytes, B lymphocytes, or any other cell such as islet cells, islet beta cells, or hepatocytes. These cells can be fixed or made apopototic by any method disclosed herein, e.g., by ECDI fixation.

[0357] A genetically modified cells can be derived (e.g., retrieved) from a non-human fetal animal, perinatal non-human animal, neonatal non-human animal, preweaning non-human animal, young adult non-human animal, adult non-human animal, or any combination thereof. In some cases, a genetically modified non-human animal cell can be derived from an embryonic tissue, e.g., an embryonic pancreatic tissue. For example, a genetically modified cell can be derived (e.g., retrieved) from an embryonic pig pancreatic tissue from embryonic day 42 (E42).

[0358] The term “fetal animal” and its grammatical equivalents can refer to any unborn offspring of an animal. The term “perinatal animal” and its grammatical equivalents can refer to an animal immediately before or after birth. For example, a perinatal period can start from 20th to 28th week of gestation and ends 1 to 4 weeks after birth. The term “neonatal animal” and its grammatical equivalents can refer to any new born animals. For example, a neonatal animal can be an animal born within a month. The term “preweaning non-human animal” and its grammatical equivalents can refer to any animal before being withdrawn from the mother's milk.

[0359] Genetically modified non-human animal cells can be formulated into a pharmaceutical composition. For example, the genetically modified non-human animal cells can be combined with a pharmaceutically acceptable excipient. An excipient that can be used is saline. The pharmaceutical composition can be used to treat patients in need of transplantation.

[0360] A genetically modified cell can comprise reduced expression of any genes, and/or any transgenes disclosed herein. Genetic modification of the cells can be done by using any of the same method as described herein for making the genetically modified animals. In some cases, a method of making a genetically modified cell originated from a non-human animal can comprise reducing expression of one or more genes and/or inserting one or more transgenes. The reduction of gene expression and/or transgene insertion can be performed using any methods described in the application, e.g., gene editing.

[0361] Genetically Modified Cells Derived from Stem Cells

[0362] Genetically modified cells can be a stem cell. These genetically modified stem cells can be used to make a potentially unlimited supply of cells that can be subsequently processed into fixed or apoptotic cells by the methods disclosed herein. As discussed above, stem cells are not capable of generating a viable human being.

[0363] The production of hundreds of millions of insulin-producing, glucose-responsive pancreatic beta cells from human pluripotent stem cells provides an unprecedented cell source for cell transplantation therapy in diabetes (Pagliuca et al., 2014). Other human stem cell-(embryonic, pluripotent, placental, induced pluripotent, etc.) derived cell sources for cell transplantation therapy in diabetes and in other diseases are being developed.

[0364] These stem cell-derived cellular grafts are subject to rejection. The rejection can be mediated by CD8+ T cells. In Type 1 diabetic recipients, human stem cell-derived functional beta cells are subject to rejection and autoimmune recurrence. Both are thought to be mediated by CD8+ T cells.

[0365] To interfere with activation and effector function of these allo-reactive and auto-reactive CD8+ T cells, established molecular methods of gene modification, including CRISP/Cas9 gene targeting, can be used to mutate the NLRC5, TAP1, and/or B2M genes in human stem cells for the purpose of preventing cell surface expression of functional MHC class I in the stem cell-derived, partially or fully differentiated cellular graft. Thus, transplanting human stem cell-derived cellular grafts lacking functional expression of MHC class I can minimize the requirements of immunosuppression otherwise required to prevent rejection and autoimmune recurrence.

[0366] However, lack of MHC class I expression on transplanted human cells will likely cause the passive activation of natural killer (NK) cells (Ohlen et al, 1989). NK cell cytotoxicity can be overcome by the expression of the human MHC class 1 gene, HLA-E, which stimulates the inhibitory receptor CD94/NKG2A on NK cells to prevent cell killing (Weiss et al., 2009; Lilienfeld et al., 2007; Sasaki et al., 1999). Successful expression of the HLA-E gene was dependent on co-expression of the human B2M (beta 2 microglobulin) gene and a cognate peptide (Weiss et al., 2009; Lilienfeld et al., 2007; Sasaki et al., 1999; Pascasova et al., 1999). A nuclease mediated break in the stem cell DNA allows for the insertion of one or multiple genes via homology directed repair. The HLA-E and hB2M genes in series can be integrated in the region of the nuclease mediated DNA break thus preventing expression of the target gene (for example, NLRC5) while inserting the transgenes.

[0367] To further minimize, if not eliminate, the need for maintenance immunosuppression in recipients of stem cell derived cellular grafts lacking functional expression of MHC class I, recipients of these grafts can also be treated with tolerizing apoptotic donor cells disclosed herein.

[0368] The methods for the production of insulin-producing pancreatic beta cells (Pagliuca et al., 2014) can potentially be applied to non-human (e.g., pig) primary isolated pluripotent, embryonic stem cells or stem-like cells (Goncalves et al., 2014; Hall et al. V. 2008). However, the recipient of these insulin-producing pancreatic beta cells likely has an active immune response that threatens the success of the graft. To overcome antibody-mediated and CD8+ T cell immune attack, the donor animal can be genetically modified before isolation of primary non-human pluripotent, embryonic stem cells or stem-like cells to prevent the expression of the GGTA1, CMAH, B4GalNT2, or MHC class I-related genes as disclosed throughout the application. The pluripotent, embryonic stem cells or stem-like cells isolated from genetically modified animals could then be differentiated into millions of insulin-producing pancreatic beta cells.

[0369] Xenogeneic stem cell-derived cell transplants can be desirable in some cases. For example, the use of human embryonic stem cells may be ethically objectionable to the recipient. Therefore, human recipients may feel more comfortable receiving a cellular graft derived from non-human sources of embryonic stem cells.

[0370] Non-human stem cells may include pig stem cells. These stem cells can be derived from wild-type pigs or from genetically engineered pigs. If derived from wild-type pigs, genetic engineering using established molecular methods of gene modification, including CRISP/Cas9 gene targeting, may best be performed at the stem cell stage. Genetic engineering may be targeted to disrupt expression of NLRC5, TAP1, and/or B2M genes to prevent functional expression of MHC class I. Disrupting genes such as NLRC5, TAP1, and B2M in the grafts can cause lack of functional expression of MHC class I on graft cells including on islet beta cells, thereby interfering with the post-transplant activation of autoreactive CD8+ T cells. Thus, this can protect the transplant, e.g., transplanted islet beta cells, from the cytolytic effector functions of autoreactive CD8+ T cells.

[0371] However, as genetic engineering of stem cells may alter their potential for differentiation, an approach can be to generate stem cell lines from genetically engineered pigs, including those pigs, in whom the expression of NLRC5, TAP1, and/or B2M genes has been disrupted.

[0372] Generation of stem cells from pigs genetically modified to prevent the expression also of the GGTA1, CMAH, B4GalNT2 genes or modified to express transgenes that encode for complement regulatory proteins CD46, CD55, or CD59, as disclosed throughout the application, could further improve the therapeutic use of the insulin-producing pancreatic beta cells or other cellular therapy products. Likewise, the same strategy as described herein can be used in other methods and compositions described throughout.

[0373] Like in recipients of human stem cell-derived cellular grafts lacking functional expression of MHC class I, the need for maintenance immunosuppression in recipients of pig stem cell-derived grafts can be further minimized by peritransplant treatments with tolerizing apoptotic donor cells.

[0374] III. Tolerizing Vaccines

[0375] Traditionally, vaccines are used to confer immunity to a host. For example, injecting an inactivated virus with adjuvant under the skin can lead to temporary or permanent immunity to the active and/or virulent version of the virus. This can be referred to as a positive vaccine (FIG. 3). However, inactivated cells (e.g., cells from a donor or an animal genetically different from the donor) that are injected intravenously can result in tolerance of donor cells or cells with similar cellular markers. This can be referred to as a tolerizing vaccine (also referred to as a negative vaccine) (FIG. 3). The inactive cells can be injected without an adjuvant. Alternatively, the inactive cells can be injected with an adjuvant. These tolerizing vaccines can be advantageous in transplantation, for example, in xenotransplantation, by tolerizing a recipient and preventing rejection. Tolerization can be conferred to a recipient without the use of immunosuppressive therapies. However, in some cases, other immunosuppressive therapies in combination with tolerizing vaccines can decrease transplantation rejection.

[0376] FIG. 4 demonstrates an exemplary approach to extending the survival of transplanted grafts (e.g., xenografts) in a subject (e.g., a human or a non-human primate) with infusion (e.g., intravenous infusion) of apoptotic cells from the donor for tolerizing vaccination under the cover of transient immunosuppression. A donor can provide xenografts for transplantation (e.g., islets), as well as cells (e.g., splenocytes) as a tolerizing vaccine. The tolerizing vaccine cells can be apoptotic cells (e.g., by ECDI fixation) and administered to the recipient before (e.g., the first vaccine, on day 7 before the transplantation) and after the transplantation (e.g., the booster vaccine, on day 1 after the transplantation). The tolerizing vaccine can provide transient immunosuppression that extends the time of survival of the transplanted grafts (e.g., islets).

[0377] Tolerizing vaccines can comprise one or more of the following types of cells: i) apoptotic cells comprising genotypically identical cells with reduced expression of GGTA1 alone, or GGTA1 and CMAH, or GGTA1, CMAH, and B4GALNT2. This can minimize or eliminate cell-mediated immunity and cell-dependent antibody-mediated immunity to organ, tissue, cell, and cell line grafts (e.g., xenografts) from animals that are genotypically identical with the apoptotic cell vaccine donor animal, or from animals that have undergone additional genetic modifications (e.g., suppression of NLRC5, TAP1, MICA, MICB, CXCL10, C3, CIITA genes or expression of transgenes comprising two or more polynucleotide inserts of ICP47, CD46, CD55, HLA-E, HLA-G (e.g., HLA-G1, HLA-G2, HLA-G3, HLA-G4, HLA-G5, HLA-G6, or HLA-G7), B2M, CD59, or any functional fragments thereof), but are genotypically similar to the donor animal from which the apoptotic cell vaccine is derived; ii) apoptotic stem cell (e.g., embryonic, pluripotent, placental, induced pluripotent, etc.)-derived donor cells (e.g., leukocytes, lymphocytes, T lymphocytes, B lymphocytes, red blood cells, graft cells, or any other donor cell) for minimizing or eliminating cell-mediated immunity and cell-dependent antibody-mediated immunity to organ, tissue, cell, and cell line grafts (e.g., xenografts) from animals that are genotypically identical with the apoptotic cell vaccine donor animal or from animals that have undergone additional genetic modifications (e.g., suppression of NLRC5, TAP1, MICA, MICB, CXCL10, C3, CIITA genes or expression of transgenes comprising two or more polynucleotide inserts of ICP47, CD46, CD55, HLA-E, HLA-G (e.g., HLA-G1, HLA-G2, HLA-G3, HLA-G4, HLA-G5, HLA-G6, or HLA-G7), B2M, CD59, or any functional fragments thereof), but are genotypically similar to the donor animal from which the apoptotic stem cell-derived cell vaccine is derived; iii) apoptotic stem cell (e.g., embryonic, pluripotent, placental, induced pluripotent, etc.)-derived donor cells (leukocytes, lymphocytes, T lymphocytes, B lymphocytes, red blood cells, graft cells such as functional islet beta cells, or any other donor cell) for minimizing or eliminating cell-mediated immunity and cell-dependent antibody-mediated immunity to organ, tissue, cell, and cell grafts (e.g., allografts) that are genotypically identical with the human stem cell line or to grafts (e.g., allografts) derived from the same stem cell line that have undergone genetic modifications (e.g., suppression of NLRC5, TAP1, MICA, MICB, CXCL10, C3, CIITA genes) but are otherwise genotypically similar to the apoptotic human stem cell-derived donor cell vaccine; iv) apoptotic donor cells, where the cells are made apoptotic by UV irradiation, gamma-irradiation, or other methods not involving incubation in the presence of ECDI. In some cases, tolerizing vaccine cells can be adminstered, e.g., infused (in some cases repeatedly infused) to a subject in need thereof. Tolerizing vaccines can be produced by disrupting (e.g., reducing expression) one or more genes from a cell. For example, genetically modified cells as described throughout the application can be used to make a tolerizing vaccine. For example, cells can have one or more genes that can be disrupted (e.g., reduced expression) including glycoprotein galactosyltransferase alpha 1, 3 (GGTA1), putative cytidine monophosphate-N-acetylneuraminic acid hydroxylase-like protein (CMAH), B4GALNT2, and/or any combination thereof. For example, a cell can have disrupted GGTA1 only, or disrupted CMAH only, or disrupted B4GALNT2 only. A cell can also have disrupted GGTA1 and CMAH, disrupted GGTA1 and B4GALNT2, or disrupted CMAH and B4GALNT2. A cell can have disrupted GGTA1, CMAH, and B4GALNT2. In some cases, the disrupted gene does not include GGTA1. A cell can also express NLRC5 (endogenously or exogenously), while GGTA1 and/or CMAH are disrupted. A cell can also have disrupted C3.

[0378] A tolerizing vaccine can be produced with cells comprising additionally expressing one or more transgenes, e.g., as described throughout the application. For example, a tolerizing vaccine can comprise a cell comprising one or more transgenes comprising one or more polynucleotide inserts of Infected cell protein 47 (ICP47), Cluster of differentiation 46 (CD46), Cluster of differentiation 55 (CD55), Cluster of differentiation 59 (CD 59), HLA-E, HLA-G (e.g., HLA-G1, HLA-G2, HLA-G3, HLA-G4, HLA-G5, HLA-G6, or HLA-G7), B2M, PD-L1, PD-L2, CD47, any functional fragments thereof, or any combination thereof. In some cases, a tolerizing vaccine can comprise a genetically modified cell comprising reduced protein expression of GGTA1, CMAH, and B4GALNT2, and transgenes comprising polynucleotides encoding proteins or functional fragments thereof, where the proteins comprise HLA-G1, PD-L1, PD-L2, and CD47. In some cases, a tolerizing vaccine can comprise a genetically modified cell comprising reduced protein expression of GGTA1, CMAH, and B4GALNT2, and transgenes comprising polynucleotides encoding proteins or functional fragments thereof, where the proteins comprise HLA-E, PD-L1, PD-L2, and CD47. In some cases, a tolerizing vaccine can comprise a cell coated with CD47 on its surface. Coating of CD47 on the surface of a cell can be accomplished by biotinylating the cell surface followed by incubating these biotinylated cells with a streptavidin-CD47 chimeric protein. For example, a tolerizing vaccine can comprise a cell coated with CD47 on its surface, where the cell comprises reduced protein expression of GGTA1, CMAH, and B4GALNT2, and transgenes comprising polynucleotides encoding proteins or functional fragments thereof, where the proteins comprise HLA-G1, PD-L1, and PD-L2. A CD47-coated cell can be a non-apoptotic cell. Alternative, a CD47 coated cell can be an apoptotic cell.

[0379] In some cases, tolerization may comprise administration of a genetically modified graft. A graft can be a cell, tissue, organ, or a combination. In some cases, immunosuppression is combined with a vaccine or tolerizing graft. In some cases, expression of HLA-G1 on a graft and an MHC or HLA class I deficiency of a graft may have tolerogenic activity independent from administration of a vaccine.

[0380] When administered in a subject, a cell of a tolerizing vaccine can have a circulation half-life. A cell of a tolerizing vaccine can have a circulation half-life of at least or at least about 0.1, 0.5, 1, 2, 3, 4, 5, 6, 7, 8, 9, 10, 12, 18, 24, 36, 48, 60, or 72 hours. For example, the circulation half-life of the tolerizing vaccine can be from or from about 0.1 to 0.5; 0.5 to 1.0; 1.0 to 2.0; 1.0 to 3.0; 1.0 to 4.0; 1.0 to 5.0; 5 to 10; 10 to 15; 15 to 24; 24 to 36; 36 to 48; 48 to 60; or 60 to 72 hours. A cell in a tolerizing vaccine can be treated to enhance its circulation half-life. Such treatment can include coating the cell with a protein, e.g., CD47. A cell treated to enhance its circulation half-life can be a non-apoptotic cell. A cell treated to enhance its circulation half-life can be an apoptotic cell. Alternatively, a cell in a tolerizing vaccine can be genetically modified (e.g., insertion of a transgene such as CD47 in its genome) to enhance its circulation half-life. A cell genetically modified to enhance its circulation half-life can be a non-apoptotic cell. A cell genetically modified to enhance its circulation half-life can be an apoptotic cell.

[0381] A tolerizing vaccine can have both one or more disrupted genes (e.g., reduced expression) and one or more transgenes. Any genes and/or transgenes as described herein can be used.

[0382] A cell that comprises one or more disrupted genes (e.g., reduced expression) can be used as, or be a part of, a tolerizing vaccine. In other words, a cell that comprises one or more disrupted genes can be or can be made into a tolerizing vaccine.

[0383] A tolerizing vaccine can have the same genotype and/or phenotype as cells, organs, and/or tissues used in transplantation. Sometimes, the genotype and/or phenotype of a tolerizing vaccine and a transplant are different. A tolerizing vaccine used for a transplant recipient can comprise cells from the transplant graft donor. A tolerizing vaccine used for a transplant recipient can comprise cells that are genetically and/or phenotypically different from the transplant graft. In some cases, a tolerizing vaccine used for a transplant recipient can comprise cells from the transplant graft donor and cells that are genetically and/or phenotypically different from the transplant graft. The cells that are genetically and/or phenotypically different from the transplant graft can be from an animal of the same species of the transplant graft donor.

[0384] A source of cells for a tolerizing vaccine can be from a human or non-human animal.

[0385] Cells as disclosed throughout the application can be made into a tolerizing vaccine. For example, a tolerizing vaccine can be made of one or more transplanted cells disclosed herein. Alternatively, a tolerizing vaccine can be made of one or more cells that are different from any of the transplanted cells. For example, the cells made into a tolerizing vaccine can be genotypically and/or phenotypically different from any of the transplanted cells. However in some cases, the tolerizing vaccine will express NLRC5 (endogenously or exogenously). A tolerizing vaccine can promote survival of cells, organs, and/or tissues in transplantation. A tolerizing vaccine can be derived from non-human animals that are genotypically identical or similar to donor cells, organs, and/or tissues. For example, a tolerizing vaccine can be cells derived from pigs (e.g., apoptotic pig cells) that are genotypically identical or similar to donor pig cells, organs, and/or tissues. Subsequently, donor cells, organs, and/or tissues can be used in allografts or xenografts. In some cases, cells for a tolerizing vaccine can be from genetically modified animals (e.g., pigs) with reduced expression of GGTA1, CMAH, and B4GalNT2, and having transgenes encoding HLA-G (or HLA-E-), human CD47, human PD-L1 and human PD-L2. Graft donor animals can be generated by further genetically modifying the animals (e.g., pigs) for tolerizing vaccine cells. For example, graft donor animals can be generated by disrupting additional genes (e.g., NLRC5 (or TAP1), C3, and CXCL10) in the abovementioned animals for tolerizing vaccines cells (FIG. 5).

[0386] A tolerizing vaccine can comprise non-human animal cells (e.g., non-human mammalian cells). For example, non-human animal cells can be from a pig, a cat, a cow, a deer, a dog, a ferret, a gaur, a goat, a horse, a mouse, a mouflon, a mule, a rabbit, a rat, a sheep, or a primate. Specifically, non-human animal cells can be porcine cells. A tolerizing vaccine can also comprise genetically modified non-human animal cells. For example, genetically modified non-human animal cells can be dead cells (e.g., apoptotic cells). A tolerizing vaccine can also comprise any genetically modified cells disclosed herein.

### Treatment of Cells to Make a Tolerizing Vaccine

[0387] A tolerizing vaccine can comprise cells treated with a chemical. In some cases, the treatment can induce apoptosis of the cells. Without being bound by theory, the apoptotic cells can be picked up by host antigen presenting cells (e.g., in the spleen) and presented to host immune cells (e.g., T cells) in a non-immunogenic fashion that leads to induction of anergy in the immune cells (e.g., T cells).

[0388] Tolerizing vaccines can comprise apoptotic cells and non-apoptotic cells. An apoptotic cell in a tolerizing vaccine can be genetically identical to a non-apoptotic cell in the tolerizing vaccine. Alternatively, an apoptotic cell in a tolerizing vaccine can be genetically different from a non-apoptotic cell in the tolerizing vaccine. Tolerizing vaccines can comprise fixed cells and non-fixed cells. A fixed cell in a tolerizing vaccine can be genetically identifical to a non-fixed cell in the tolerizing vaccine. Alternatively, a fixed cell in a tolerizing vaccine can be genetically different from a non-fixed cell in the tolerizing vaccine. In some cases, the fixed cell can be a 1-ethyl-3-(3-dimethylaminopropyl)-carbodiimide (ECDI)-fixed cell.

[0389] Cells in a tolerizing vaccine can be fixed using a chemical, e.g., ECDI. The fixation can make the cells apoptotic. A tolerizing vaccine, cells, kits and methods disclosed herein can comprise ECDI and/or ECDI treatment. For example, a tolerizing vaccine can be cells, e.g., the genetically modified cell as disclosed herein, that are treated with 1-ethyl-3-(3-dimethylaminopropyl)-carbodiimide (ECDI). In other words, the genetically modified cells as described throughout can be treated with ECDI to create a tolerizing vaccine. A tolerizing vaccine can then be used in transplantation to promote survival of cells, organs, and/or tissues that are transplanted. It is also contemplated that ECDI derivatives, functionalized ECDI, and/or substituted ECDI can also be used to treat the cells for a tolerizing vaccine. In some cases, cells for a tolerizing vaccine can be treated with any suitable carbodiimide derivatives, e.g., ECDI, N, N′-diisopropylcarbodiimide (DIC), N,N′-dicyclohexylcarbodiimide (DCC), and other carbodiimide derivatives understood by those in the art.

[0390] Cells for tolerizing vaccines can also be made apoptotic methods not involving incubation in the presence of ECDI, e.g., other chemicals or irradiation such as UV irradiation or gamma-irradiation.

[0391] ECDI can chemically cross-link free amine and carboxyl groups, and can effectively induce apoptosis in cells, organs, and/or tissues, e.g., from animal that gave rise to both a tolerizing vaccine and a donor non-human animal. In other words, the same genetically modified animal can give rise to a tolerizing vaccine and cells, tissues and/or organs that are used in transplantation. For example, the genetically modified cells as disclosed herein can be treated with ECDI. This ECDI fixation can lead to the creation of a tolerizing vaccine.

[0392] Genetically modified cells that can be used to make a tolerizing vaccine can be derived from: a spleen (including splenic B cells), liver, peripheral blood (including peripheral blood B cells), lymph nodes, thymus, bone marrow, or any combination thereof. For example, cells can be spleen cells, e.g., porcine spleen cells. In some cases, cells can be expanded ex-vivo. In some cases, cells can be derived from fetal, perinatal, neonatal, preweaning, and/or young adult, non-human animals. In some cases, cells can be derived from an embryo of a non-human animal.

[0393] Cells in a tolerizing vaccine can also comprise two or more disrupted (e.g., reduced expression) genes, where the two or more disrupted genes can be glycoprotein galactosyltransferase alpha 1,3 (GGTA1), putative cytidine monophosphate-N-acetylneuraminic acid hydroxylase-like protein (CMAH), HLA-E, HLA-G (e.g., HLA-G1, HLA-G2, HLA-G3, HLA-G4, HLA-G5, HLA-G6, or HLA-G7), B2M, and B4GALNT2, any functional fragments thereof, or any combination thereof. In some cases, the two or more disrupted genes do not include GGTA1. As described above, disruption can be a knockout or suppression of gene expression. Knockout can be performed by gene editing, for example, by using a CRISPR/Cas system. Alternatively, suppression of gene expression can be done by knockdown, for example, using RNA interference, shRNA, one or more dominant negative transgenes. In some cases, cells can further comprise one or more transgenes as disclosed herein. For example, one or more transgenes can be CD46, CD55, CD59, or any combination thereof.

[0394] Cells in a tolerizing vaccine can also be derived from one or more donor non-human animals. In some cases, cells can be derived from the same donor non-human animal. Cells can be derived from one or more recipient non-human animals. In some cases, cells can be derived from two or more non-human animals (e.g., pig).

[0395] A tolerizing vaccine can comprise from or from about 0.001 and about 5.0, e.g., from or from about 0.001 and 1.0, endotoxin unit per kg bodyweight of a prospective recipient. For example, a tolerizing vaccine can comprise from or from about 0.01 to 5.0; 0.01 to 4.5; 0.01 to 4.0, 0.01 to 3.5; 0.01 to 3.0; 0.01 to 2.5; 0.01 to 2.0; 0.01 to 1.5; 0.01 to 1.0; 0.01 to 0.9; 0.01 to 0.8; 0.01 to 0.7; 0.01 to 0.6; 0.01 to 0.5; 0.01 to 0.4; 0.01 to 0.3; 0.01 to 0.2; or 0.01 to 0.1 endotoxin unit per kg bodyweight of a prospective recipient.

[0396] A tolerizing vaccine can comprise from or from about 1 to 100 aggregates, per μl. For example, a tolerizing vaccine can comprise from or from about 1 to 5; 1 to 10, or 1 to 20 aggregate per μl. A tolerizing vaccine can comprise at least or at least about 1, 5, 10, 20, 50, or 100 aggregates.

[0397] A tolerizing vaccine can trigger a release from or from about 0.001 pg/ml to 10.0 pg/ml, e.g., from or from about 0.001 pg/ml to 1.0 pg/ml, IL-1 beta when about 50,000 frozen to thawed human peripheral blood mononuclear cells are incubated with about 160,000 cells of the tolerizing vaccine (e.g., pig cells). For example, a tolerizing vaccine triggers a release of from or from about 0.001 to 10.0; 0.001 to 5.0; 0.001 to 1.0; 0.001 to 0.8; 0.001 to 0.2; or 0.001 to 0.1 pg/ml IL-1 beta when about 50,000 frozen to thawed human peripheral blood mononuclear cells are incubated with about 160,000 cell of the tolerizing vaccine (e.g., pig cells). A tolerizing vaccine can trigger a release of from or from about 0.001 to 2.0 pg/ml, e.g., from or from about 0.001 to 0.2 pg/ml, IL-6 when about 50,000 frozen to thawed human peripheral blood mononuclear cells are incubated with about 160,000 cells of the tolerizing vaccine (e.g., pig cells). For example, a tolerizing vaccine can trigger a release of from or from about 0.001 to 2.0; 0.001 to 1.0; 0.001 to 0.5; or 0.001 to 0.1 pg/ml IL-6 when about 50,000 frozen to thawed human peripheral blood mononuclear cells are incubated with about 160,000 cells of the tolerizing vaccine (e.g., pig cells).

[0398] A tolerizing vaccine can comprise more than or more than about 60%, e.g., more than or more than about 85%, Annexin V positive, apoptotic cells after a 4 hour or after about 4 hours post-release incubation at 37° C. For example, a tolerizing vaccine comprises more than 60%, 70%, 80%, 90%, or 99% Annexin V positive, apoptotic cells after about a 4 hour post-release incubation at 37° C.

[0399] A tolerizing vaccine can include from or from about 0.01% to 10%, e.g., from or from about 0.01% to 2%, necrotic cells. For example, a tolerizing vaccine includes from or from about 0.01% to 10%; 0.01% to 7.5%, 0.01% to 5%; 0.01% to 2.5%; or 0.01% to 1% necrotic cells.

[0400] Administering a tolerizing vaccine comprising ECDI-treated cells, organs, and/or tissues before, during, and/or after administration of donor cells can induce tolerance for cells, organs, and/or tissues in a recipient (e.g., a human or a non-human animal). ECDI-treated cells can be administered by intravenous infusion.

[0401] Tolerance induced by infusion of a tolerizing vaccine comprising ECDI-treated splenocytes is likely dependent on synergistic effects between an intact programmed death 1 receptor—programmed death ligand 1 signaling pathway and CD4⁺CD25⁺Foxp3⁺ regulatory T cells.

[0402] Cells in a telorizing vaccine can be made into apoptotic cells (e.g., tolerizing vaccines) not only by ECDI fixation, but also through other methods. For example, any of the genetically modified cells as disclosed throughout, e.g., non-human cells animal cells or human cells (including stem cells), can be made apopototic by exposing the genetically modified cells to UV irradiation. The genetically modified cells can also be made apopototic by exposing it to gamma-irradiation. Other methods, not involving ECDI are also comtemplated, for example, by EtOH fixation.

[0403] Cells in a tolerizing vaccine, e.g., ECDI-treated cells, antigen-coupled cells, and/or epitope-coupled cells can comprise donor cells (e.g., cells from the donor of transplant grafts). Cells in a tolerizing vaccine, e.g., ECDI-treated cells, antigen-coupled cells, and/or epitope-coupled cells can comprise recipient cells (e.g., cells from the recipient of transplant grafts). Cells in a tolerizing vaccine, e.g., ECDI-treated cells, antigen-coupled cells, and/or epitope-coupled cells can comprise third party (e.g., neither donor nor recipient) cells. In some cases, third party cells are from a non-human animal of the same species as a recipient and/or donor. In other cases, third party cells are from a non-human animal of a different species as a recipient and/or donor.

[0404] ECDI-treatment of cells can be performed in the presence of one or more antigens and/or epitopes. ECDI-treated cells can comprise donor, recipient and/or third party cells. Likewise, antigens and/or epitopes can comprise donor, recipient and/or third party antigens and/or epitopes. In some cases, donor cells are coupled to recipient antigens and/or epitopes (e.g., ECDI-induced coupling). For example, soluble donor antigen derived from genetically engineered and genotypically identical donor cells (e.g., porcine cells) is coupled to recipient peripheral blood mononuclear cells with ECDI and the ECDI-coupled cells are administered via intravenous infusion.

[0405] In some cases, recipient cells are coupled to donor antigens and/or epitopes (e.g., ECDI-induced coupling). In some cases, recipient cells are coupled to third party antigens and/or epitopes (e.g., ECDI-induced coupling). In some cases, donor cells are coupled to recipient antigens and/or epitopes (e.g., ECDI-induced coupling). In some cases, donor cells are coupled to third party antigens and/or epitopes (e.g., ECDI-induced coupling). In some cases, third party cells are coupled to donor antigens and/or epitopes (e.g., ECDI-induced coupling). In some cases, third party cells are coupled to recipient antigens and/or epitopes (e.g., ECDI-induced coupling). For example, soluble donor antigen derived from genetically engineered and genotypically identical donor cells (e.g., porcine cells) is coupled to polystyrene nanoparticles with ECDI and the ECDI-coupled cells are administered via intravenous infusion.

[0406] Tolerogenic potency of any of these tolerizing cell vaccines can be further optimized by coupling to the surface of cells one or more of the following: IFN-g, NF-kB inhibitors (such as curcumin, triptolide, Bay-117085), vitamin D3, siCD40, cobalt protoporphyrin, insulin B9-23, or other immunomodulatory molecules that modify the function of host antigen-presenting cells and host lymphocytes.

[0407] These apoptotic cell vaccines can also be complemented by donor cells engineered to display on their surface molecules (such as FasL, PD-L1, galectin-9, CD8alpha) that trigger apoptotic death of donor-reactive cells.

[0408] Tolerizing vaccines dislosed herein can increase the duration of survival of a transplant (e.g., a xenograft or an allograft transplant) in a recipient. Tolerizing vaccines disclosed herein can also reduce or eliminate need for immunosupression following transplantation. Xenograft or allograft transplant can be an organ, tissue, cell or cell line. Xenograft transplants and tolerizing vaccines can also be from different species. Alternatively, xenograft transplants and the tolerizing vaccines can be from the same species. For example, a xenograft transplant and a tolerizing vaccine can be from substantially genetically identical individuals (e.g., the same individual).

[0409] In some cases a tolerizing vaccine or negative vaccine can produce synergistic effects in a subject administered a tolerizing or negative vaccine. In other cases, a tolerizing or negative vaccine can produce antagonistic effects in a subject administered a tolerizing or negative vaccine.

[0410] The ECDI fixed cells can be formulated into a pharmaceutical composition. For example, the ECDI fixed cells can be combined with a pharmaceutically acceptable excipient. An excipient that can be used is saline. An excipient that can be used is phosphate buffered saline (PBS). The pharmaceutical compositions can be then used to treat patients in need of transplantation.

[0411] IV. Method of Making Genetically Modified Non-Human Animals

[0412] In order to make a genetically modified non-human animal as described above, various techniques can be used. Disclosed herein are a few examples to create genetically modified animals. It is to be understood that the methods disclosed herein are simply examples, and are not meant to limiting in any way.

### Gene Disruption

[0413] Gene disruption can be performed by any methods described above, for example, by knockout, knockdown, RNA interference, dominant negative, etc. A detailed description of the methods is disclosed above in the section regarding genetically modified non-human animals.

### CRISPR/Cas System

[0414] Methods described herein can take advantage of a CRISPR/Cas system. For example, double-strand breaks (DSBs) can be generated using a CRISPR/Cas system, e.g., a type II CRISPR/Cas system. A Cas enzyme used in the methods disclosed herein can be Cas9, which catalyzes DNA cleavage. Enzymatic action by Cas9 derived from Streptococcus pyogenes or any closely related Cas9 can generate double stranded breaks at target site sequences which hybridize to 20 nucleotides of a guide sequence and that have a protospacer-adjacent motif (PAM) following the 20 nucleotides of the target sequence.

[0415] A vector can be operably linked to an enzyme-coding sequence encoding a CRISPR enzyme, such as a Cas protein. Cas proteins that can be used herein include class 1 and class 2. Non-limiting examples of Cas proteins include Cas1, Cas1B, Cas2, Cas3, Cas4, Cas5, Cas5d, Cas5t, Cas5h, Cas5a, Cas6, Cas7, Cas8, Cas9 (also known as Csn1 or Csx12), Cas10, Csy1, Csy2, Csy3, Csy4, Cse1, Cse2, Cse3, Cse4, Cse5e, Csc1, Csc2, Csa5, Csn1, Csn2, Csm1, Csm2, Csm3, Csm4, Csm5, Csm6, Cmr1, Cmr3, Cmr4, Cmr5, Cmr6, Csb1, Csb2, Csb3, Csx17, Csx14, Csx10, Csx16, CsaX, Csx3, Csx1, Csx1S, Csf1, Csf2, CsO, Csf4, Csd1, Csd2, Cst1, Cst2, Csh1, Csh2, Csa1, Csa2, Csa3, Csa4, Csa5, C2c1, C2c2, C2c3, Cpf1, CARF, DinG, homologues thereof, or modified versions thereof. An unmodified CRISPR enzyme can have DNA cleavage activity, such as Cas9. A CRISPR enzyme can direct cleavage of one or both strands at a target sequence, such as within a target sequence and/or within a complement of a target sequence. For example, a CRISPR enzyme can direct cleavage of one or both strands within about 1, 2, 3, 4, 5, 6, 7, 8, 9, 10, 15, 20, 25, 50, 100, 200, 500, or more base pairs from the first or last nucleotide of a target sequence. A vector that encodes a CRISPR enzyme that is mutated to with respect, to a corresponding wild-type enzyme such that the mutated CRISPR enzyme lacks the ability to cleave one or both strands of a target polynucleotide containing a target sequence can be used.

[0416] Cas9 can refer to a polypeptide with at least or at least about 50%, 60%, 70%, 80%, 90%, 91%, 92%, 93%, 94%, 95%, 96%, 97%, 98%, 99%, or 100% sequence identity and/or sequence homology to a wild type exemplary Cas9 polypeptide (e.g., Cas9 from S. pyogenes). Cas9 can refer to a polypeptide with at most or at most about 50%, 60%, 70%, 80%, 90%, 91%, 92%, 93%, 94%, 95%, 96%, 97%, 98%, 99%, or 100% sequence identity and/or sequence homology to a wild type exemplary Cas9 polypeptide (e.g., from S. pyogenes). Cas9 can refer to the wild type or a modified form of the Cas9 protein that can comprise an amino acid change such as a deletion, insertion, substitution, variant, mutation, fusion, chimera, or any combination thereof.

[0417] S. pyogenes Cas9 (SpCas9) can be used as a CRISPR endonuclease for genome engineering. However, others can be used. In some cases, a different endonuclease may be used to target certain genomic targets. In some cases, synthetic SpCas9-derived variants with non-NGG PAM sequences may be used. Additionally, other Cas9 orthologues from various species have been identified and these “non-SpCas9s” can bind a variety of PAM sequences that could also be useful for the present invention. For example, the relatively large size of SpCas9 (approximately 4 kb coding sequence) can lead to plasmids carrying the SpCas9 cDNA that may not be efficiently expressed in a cell. Conversely, the coding sequence for Staphylococcus aureus Cas9 (SaCas9) is approximatelyl kilo base shorter than SpCas9, possibly allowing it to be efficiently expressed in a cell. Similar to SpCas9, the SaCas9 endonuclease is capable of modifying target genes in mammalian cells in vitro and in mice in vivo. In some cases, a Cas protein may target a different PAM sequence. In some cases, a target gene, such as NLRC5, may be adjacent to a Cas9 PAM, 5′-NGG, for example. In other cases, other Cas9 orthologs may have different PAM requirements. For example, other PAMs such as those of S. thermophilus (5′-NNAGAA for CRISPR1 and 5′-NGGNG for CRISPR3) and Neisseria meningiditis (5′-NNNNGATT) may also be found adjacent to a target gene, such as NLRC5. A transgene of the present invention may be inserted adjacent to any PAM sequence from any Cas, or Cas derivative, protein. In some cases, a PAM can be found every, or about every, 8 to 12 base pairs in a genome. A PAM can be found every 1 to 15 basepairs in a genome. A PAM can also be found every 5 to 20 basepairs in a genome. In some cases, a PAM can be found every 5, 6, 7, 8, 9, 10, 11, 12, 13, 14, 15, 16, 17, 18, 19, 20, or more basepairs in a genome. A PAM can be found at or between every 5-100 base pairs in a genome.

[0418] For example, for a S. pyogenes system, a target gene sequence can precede (i.e., be 5′ to) a 5′-NGG PAM, and a 20-nt guide RNA sequence can base pair with an opposite strand to mediate a Cas9 cleavage adjacent to a PAM. In some cases, an adjacent cut may be or may be about 3 base pairs upstream of a PAM. In some cases, an adjacent cut may be or may be about 10 base pairs upstream of a PAM. In some cases, an adjacent cut may be or may be about 0-20 base pairs upstream of a PAM. For example, an adjacent cut can be next to, 1, 2, 3, 4, 5, 6, 7, 8, 9, 10, 11, 12, 13, 14, 15, 16, 17, 18, 19, 20, 21, 22, 23, 24, 25, 26, 27, 28, 29, or 30 base pairs upstream of a PAM. An adjacent cut can also be downstream of a PAM by 1 to 30 base pairs.

[0419] Alternatives to S. pyogenes Cas9 may include RNA-guided endonucleases from the Cpf1 family that display cleavage activity in mammalian cells. Unlike Cas9 nucleases, the result of Cpf1-mediated DNA cleavage is a double-strand break with a short 3′ overhang. Cpf1's staggered cleavage pattern may open up the possibility of directional gene transfer, analogous to traditional restriction enzyme cloning, which may increase the efficiency of gene editing. Like the Cas9 variants and orthologues described above, Cpf1 may also expand the number of sites that can be targeted by CRISPR to AT-rich regions or AT-rich genomes that lack the NGG PAM sites favored by SpCas9.

[0420] A vector that encodes a CRISPR enzyme comprising one or more nuclear localization sequences (NLSs) can be used. For example, there can be or be about 1, 2, 3, 4, 5, 6, 7, 8, 9, 10 NLSs used. A CRISPR enzyme can comprise the NLSs at or near the ammo-terminus, about or more than about 1, 2, 3, 4, 5, 6, 7, 8, 9, 10 NLSs at or near the carboxy-terminus, or any combination of these (e.g., one or more NLS at the ammo-terminus and one or more NLS at the carboxy terminus). When more than one NLS is present, each can be selected independently of others, such that a single NLS can be present in more than one copy and/or in combination with one or more other NLSs present in one or more copies.

[0421] CRISPR enzymes used in the methods can comprise at most 6 NLSs. An NLS is considered near the N- or C-terminus when the nearest amino acid to the NLS is within about 50 amino acids along a polypeptide chain from the N- or C-terminus, e.g., within 1, 2, 3, 4, 5, 10, 15, 20, 25, 30, 40, or 50 amino acids.

[0422] Guide RNA

[0423] As used herein, the term “guide RNA” and its grammatical equivalents can refer to an RNA which can be specific for a target DNA and can form a complex with Cas protein. An RNA/Cas complex can assist in “guiding” Cas protein to a target DNA.

[0424] A method disclosed herein also can comprise introducing into a cell or embryo at least one guide RNA or nucleic acid, e.g., DNA encoding at least one guide RNA. A guide RNA can interact with a RNA-guided endonuclease to direct the endonuclease to a specific target site, at which site the 5′ end of the guide RNA base pairs with a specific protospacer sequence in a chromosomal sequence.

[0425] A guide RNA can comprise two RNAs, e.g., CRISPR RNA (crRNA) and transactivating crRNA (tracrRNA). A guide RNA can sometimes comprise a single-chain RNA, or single guide RNA (sgRNA) formed by fusion of a portion (e.g., a functional portion) of crRNA and tracrRNA. A guide RNA can also be a dualRNA comprising a crRNA and a tracrRNA. Furthermore, a crRNA can hybridize with a target DNA.

[0426] As discussed above, a guide RNA can be an expression product. For example, a DNA that encodes a guide RNA can be a vector comprising a sequence coding for the guide RNA. A guide RNA can be transferred into a cell or organism by transfecting the cell or organism with an isolated guide RNA or plasmid DNA comprising a sequence coding for the guide RNA and a promoter. A guide RNA can also be transferred into a cell or organism in other way, such as using virus-mediated gene delivery.

[0427] A guide RNA can be isolated. For example, a guide RNA can be transfected in the form of an isolated RNA into a cell or organism. A guide RNA can be prepared by in vitro transcription using any in vitro transcription system known in the art. A guide RNA can be transferred to a cell in the form of isolated RNA rather than in the form of plasmid comprising encoding sequence for a guide RNA.

[0428] A guide RNA can comprise three regions: a first region at the 5′ end that can be complementary to a target site in a chromosomal sequence, a second internal region that can form a stem loop structure, and a third 3′ region that can be single-stranded. A first region of each guide RNA can also be different such that each guide RNA guides a fusion protein to a specific target site. Further, second and third regions of each guide RNA can be identical in all guide RNAs.

[0429] A first region of a guide RNA can be complementary to sequence at a target site in a chromosomal sequence such that the first region of the guide RNA can base pair with the target site. In some cases, a first region of a guide RNA can comprise from or from about 10 nucleotides to 25 nucleotides (i.e., from 10 nts to 25 nts; or from about 10 nts to about 25 nts; or from 10 nts to about 25 nts; or from about 10 nts to 25 nts) or more. For example, a region of base pairing between a first region of a guide RNA and a target site in a chromosomal sequence can be or can be about 10, 11, 12, 13, 14, 15, 16, 17, 18, 19, 20, 22, 23, 24, 25, or more nucleotides in length. Sometimes, a first region of a guide RNA can be or can be about 19, 20, or 21 nucleotides in length.

[0430] A guide RNA can also comprises a second region that forms a secondary structure. For example, a secondary structure formed by a guide RNA can comprise a stem (or hairpin) and a loop. A length of a loop and a stem can vary. For example, a loop can range from or from about 3 to 10 nucleotides in length, and a stem can range from or from about 6 to 20 base pairs in length. A stem can comprise one or more bulges of 1 to 10 or about 10 nucleotides. The overall length of a second region can range from or from about 16 to 60 nucleotides in length. For example, a loop can be or can be about 4 nucleotides in length and a stem can be or can be about 12 base pairs.

[0431] A guide RNA can also comprise a third region at the 3′ end that can be essentially single-stranded. For example, a third region is sometimes not complementarity to any chromosomal sequence in a cell of interest and is sometimes not complementarity to the rest of a guide RNA. Further, the length of a third region can vary. A third region can be more than or more than about 4 nucleotides in length. For example, the length of a third region can range from or from about 5 to 60 nucleotides in length.

[0432] A guide RNA can target any exon or intron of a gene target. In some cases, a guide can target exon 1 or 2 of a gene, in other cases; a guide can target exon 3 or 4 of a gene. A composition can comprise multiple guide RNAs that all target the same exon or in some cases, multiple guide RNAs that can target different exons. An exon and an intron of a gene can be targeted.

[0433] A guide RNA can target a nucleic acid sequence of or of about 20 nucleotides. A target nucleic acid can be less than or less than about 20 nucleotides. A target nucleic acid can be at least or at least about 5, 10, 15, 16, 17, 18, 19, 20, 21, 22, 23, 24, 25, 30, or anywhere between 1-100 nucleotides in length. A target nucleic acid can be at most or at most about 5, 10, 15, 16, 17, 18, 19, 20, 21, 22, 23, 24, 25, 30, 40, 50, or anywhere between 1-100 nucleotides in length. A target nucleic acid sequence can be or can be about 20 bases immediately 5′ of the first nucleotide of the PAM. A guide RNA can target a nucleic acid sequence. A target nucleic acid can be at least or at least about 1-10, 1-20, 1-30, 1-40, 1-50, 1-60, 1-70, 1-80, 1-90, or 1-100.

[0434] A guide nucleic acid, for example, a guide RNA, can refer to a nucleic acid that can hybridize to another nucleic acid, for example, the target nucleic acid or protospacer in a genome of a cell. A guide nucleic acid can be RNA. A guide nucleic acid can be DNA. The guide nucleic acid can be programmed or designed to bind to a sequence of nucleic acid site-specifically. A guide nucleic acid can comprise a polynucleotide chain and can be called a single guide nucleic acid. A guide nucleic acid can comprise two polynucleotide chains and can be called a double guide nucleic acid. A guide RNA can be introduced into a cell or embryo as an RNA molecule. For example, a RNA molecule can be transcribed in vitro and/or can be chemically synthesized. An RNA can be transcribed from a synthetic DNA molecule, e.g., a gBlocks® gene fragment. A guide RNA can then be introduced into a cell or embryo as an RNA molecule. A guide RNA can also be introduced into a cell or embryo in the form of a non-RNA nucleic acid molecule, e.g., DNA molecule. For example, a DNA encoding a guide RNA can be operably linked to promoter control sequence for expression of the guide RNA in a cell or embryo of interest. A RNA coding sequence can be operably linked to a promoter sequence that is recognized by RNA polymerase III (Pol III). Plasmid vectors that can be used to express guide RNA include, but are not limited to, px330 vectors and px333 vectors (FIG. 11 and FIG. 89). In some cases, a plasmid vector (e.g., px333 vector) can comprise at least two guide RNA-encoding DNA sequences. A px333 vector can be used, for example, to introduce GGTA1-10 and Gal2-2, or GGTA1-10, Gal2-2, and NLRC5-6. In other cases, NLRC5-6 and Gal2-2 can be introduced with a px333 vector.

[0435] A DNA sequence encoding a guide RNA can also be part of a vector. Further, a vector can comprise additional expression control sequences (e.g., enhancer sequences, Kozak sequences, polyadenylation sequences, transcriptional termination sequences, etc.), selectable marker sequences (e.g., antibiotic resistance genes), origins of replication, and the like. A DNA molecule encoding a guide RNA can also be linear. A DNA molecule encoding a guide RNA can also be circular.

[0436] When DNA sequences encoding an RNA-guided endonuclease and a guide RNA are introduced into a cell, each DNA sequence can be part of a separate molecule (e.g., one vector containing an RNA-guided endonuclease coding sequence and a second vector containing a guide RNA coding sequence) or both can be part of a same molecule (e.g., one vector containing coding (and regulatory) sequence for both an RNA-guided endonuclease and a guide RNA).

[0437] Guide RNA can target a gene in a pig or a pig cell. In some cases, guide RNA can target a pig NLRC5 gene, e.g., sequences listed in Table 4. In some cases, guide RNA can be designed to target pig NLRC5, GGTA1 or CMAH gene. Exemplary oligonucleotides for making the guide RNA are listed in Table 5. In some cases, at least two guide RNAs are introduced. At least two guide RNAs can each target two genes. For example, in some cases, a first guide RNA can target GGTA1 and a second guide RNA can target Gal2-2. In some cases, a first guide RNA can target NLRC5 and a second guide RNA can target Gal2-2. In other cases, a first guide RNA can target GGTA1-10 and a second guide RNA can target Gal2-2.

[0438] A guide nucleic acid can comprise one or more modifications to provide a nucleic acid with a new or enhanced feature. A guide nucleic acid can comprise a nucleic acid affinity tag. A guide nucleic acid can comprise synthetic nucleotide, synthetic nucleotide analog, nucleotide derivatives, and/or modified nucleotides.

[0439] In some cases, a gRNA can comprise modifications. A modification can be made at any location of a gRNA. More than one modification can be made to a single gRNA. A gRNA can undergo quality control after a modification. In some cases, quality control may include PAGE, HPLC, MS, or any combination thereof.

[0440] A modification of a gRNA can be a substitution, insertion, deletion, chemical modification, physical modification, stabilization, purification, or any combination thereof.

[0441] A gRNA can also be modified by 5′adenylate, 5′ guanosine-triphosphate cap, 5′N⁷-Methylguanosine-triphosphate cap, 5′triphosphate cap, 3′phosphate, 3′thiophosphate, 5′phosphate, 5′thiophosphate, Cis-Syn thymidine dimer, trimers, C12 spacer, C3 spacer, C6 spacer, dSpacer, PC spacer, rSpacer, Spacer 18, Spacer 9,3′-3′ modifications, 5′-5′ modifications, abasic, acridine, azobenzene, biotin, biotin BB, biotin TEG, cholesteryl TEG, desthiobiotin TEG, DNP TEG, DNP-X, DOTA, dT-Biotin, dual biotin, PC biotin, psoralen C2, psoralen C6, TINA, 3′DABCYL, black hole quencher 1, black hole quencer 2, DABCYL SE, dT-DABCYL, IRDye QC-1, QSY-21, QSY-35, QSY-7, QSY-9, carboxyl linker, thiol linkers, 2′deoxyribonucleoside analog purine, 2′deoxyribonucleoside analog pyrimidine, ribonucleoside analog, 2′-0-methyl ribonucleoside analog, sugar modified analogs, wobble/universal bases, fluorescent dye label, 2′fluoro RNA, 2′O-methyl RNA, methylphosphonate, phosphodiester DNA, phosphodiester RNA, phosphothioate DNA, phosphorothioate RNA, UNA, pseudouridine-5′-triphosphate, 5-methylcytidine-5′-triphosphate, or any combination thereof.

[0442] In some cases, a modification is permanent. In other cases, a modification is transient. In some cases, multiple modifications are made to a gRNA. A gRNA modification may alter physio-chemical properties of a nucleotide, such as their conformation, polarity, hydrophobicity, chemical reactivity, base-pairing interactions, or any combination thereof.

[0443] A modification can also be a phosphorothioate substitute. In some cases, a natural phosphodiester bond may be susceptible to rapid degradation by cellular nucleases and; a modification of internucleotide linkage using phosphorothioate (PS) bond substitutes can be more stable towards hydrolysis by cellular degradation. A modification can increase stability in a gRNA. A modification can also enhance biological activity. In some cases, a phosphorothioate enhanced RNA gRNA can inhibit RNase A, RNase T1, calf serum nucleases, or any combinations thereof. These properties can allow the use of PS-RNA gRNAs to be used in applications where exposure to nucleases is of high probability in vivo or in vitro. For example, phosphorothioate (PS) bonds can be introduced between the last 3-5 nucleotides at the 5′- or 3′-end of a gRNA which can inhibit exonuclease degradation. In some cases, phosphorothioate bonds can be added throughout an entire gRNA to reduce attack by endonucleases.

TABLE 4
Exemplary Sequences of the NLRC5 gene to be
targeted by guide RNAs

| SEQ ID | |
|---|---|
| No. | Sequence (5′-3′) |
| 61 | ggggaggaagaacttcacct |
| 62 | gtaggacgaccctctgtgtg |
| 63 | gaccctctgtgtggggtctg |
| 64 | ggctcggttccattgcaaga |
| 65 | gctcggttccattgcaagat |
| 66 | ggttccattgcaagatgggc |
| 67 | gtcccctcctgagtgtcgaa |
| 68 | gcctcaggtacagatcaaaa |
| 69 | ggacctgggtgccaggaacg |
| 70 | gtacccagagtcagatcacc |
| 71 | gtacccagagtcagatcacc |
| 72 | gtgcccttcgacactcagga |
| 73 | gtgcccttcgacactcagga |
| 74 | gtgcccttcgacactcagga |
| 75 | gggggccccaaggcagaaga |
| 76 | ggcagtcttccagtacctgg |

TABLE 5
Exemplary oligonucleotides for making guide RNA constructs

| | | | SEQ | |
|---|---|---|---|---|
| | SEQ | | ID | |
| Gene | ID No. | Forward sequence (5′ to 3′) | No. | Reverse sequence (5′ to 3′) |
| NLRC5 | 77 | acaccggggaggaagaacttcacctg | 78 | aaaacaggtgaagttcttcctccccg |
| NLRC5 | 79 | acaccgtaggacgaccctctgtgtgg | 80 | aaaaccacacagagggtcgtcctacg |
| NLRC5 | 81 | acaccgaccctctgtgtggggtctgg | 82 | aaaaccagaccccacacagagggtcg |
| NLRC5 | 83 | acaccggctcggttccattgcaagag | 84 | aaaactcttgcaatggaaccgagccg |
| NLRC5 | 85 | acaccgctcggttccattgcaagatg | 86 | aaaacatcttgcaatggaaccgagcg |
| NLRC5 | 87 | acaccggttccattgcaagatgggcg | 88 | aaaacgcccatcttgcaatggaaccg |
| NLRC5 | 89 | acaccgtcccctcctgagtgtcgaag | 90 | aaaacttcgacactcaggaggggacg |
| NLRC5 | 91 | acaccgcctcaggtacagatcaaaag | 92 | aaaacttttgatctgtacctgaggcg |
| NLRC5 | 93 | acaccggacctgggtgccaggaacgg | 94 | aaaaccgttcctggcacccaggtccg |
| NLRC5 | 95 | acaccgtacccagagtcagatcaccg | 96 | aaaacggtgatctgactctgggtacg |
| NLRC5 | 97 | acaccgtacccagagtcagatcaccg | 98 | aaaacggtgatctgactctgggtacg |
| NLRC5 | 99 | acaccgtgcccttcgacactcaggag | 100 | aaaactcctgagtgtcgaagggcacg |
| NLRC5 | 101 | acaccgtgcccttcgacactcaggag | 102 | aaaactcctgagtgtcgaagggcacg |
| NLRC5 | 103 | acaccgtgcccttcgacactcaggag | 104 | aaaactcctgagtgtcgaagggcacg |
| NLRC5 | 105 | acaccgggggccccaaggcagaagag | 106 | aaaactcttctgccttggggcccccg |
| NLRC5 | 107 | acaccggcagtcttccagtacctggg | 108 | aaaacccaggtactggaagactgccg |
| GGTA1 | 109 | caccgagaaaataatgaatgtcaa | 110 | aaacttgacattcattattactc |
| CMAH | 111 | caccgagtaaggtacgtgatctgt | 112 | aaacacagatcacgtaccttactc |

[0444] Homologous Recombination

[0445] Homologous recombination can also be used for any of the relevant genetic modifications as disclosed herein. Homologous recombination can permit site-specific modifications in endogenous genes and thus novel modifications can be engineered into a genome. For example, the ability of homologous recombination (gene conversion and classical strand breakage/rejoining) to transfer genetic sequence information between DNA molecules can render targeted homologous recombination and can be a powerful method in genetic engineering and gene manipulation.

[0446] Cells that have undergone homologous recombination can be identified by a number of methods. For example, a selection method can detect an absence of an immune response against a cell, for example by a human anti-gal antibody. A selection method can also include assessing a level of clotting in human blood when exposed to a cell or tissue. Selection via antibiotic resistance can be used for screening.

### Making Transgenic Non-Human Animals

[0447] Random Insertion

[0448] One or more transgenes of the methods described herein can be inserted randomly to any locus in a genome of a cell. These transgenes can be functional if inserted anywhere in a genome. For instance, a transgene can encode its own promoter or can be inserted into a position where it is under the control of an endogenous promoter. Alternatively, a transgene can be inserted into a gene, such as an intron of a gene or an exon of a gene, a promoter, or a non-coding region. A transgene can be integrated into a first exon of a gene.

[0449] A DNA encoding a transgene sequences can be randomly inserted into a chromosome of a cell. A random integration can result from any method of introducing DNA into a cell known to one of skill in the art. This can include, but is not limited to, electroporation, sonoporation, use of a gene gun, lipotransfection, calcium phosphate transfection, use of dendrimers, microinjection, use of viral vectors including adenoviral, AAV, and retroviral vectors, and/or group II ribozymes.

[0450] A DNA encoding a transgene can also be designed to include a reporter gene so that the presence of the transgene or its expression product can be detected via activation of the reporter gene. Any reporter gene known in the art can be used, such as those disclosed above. By selecting in cell culture those cells in which a reporter gene has been activated, cells can be selected that contain a transgene.

[0451] A DNA encoding a transgene can be introduced into a cell via electroporation (FIG. 90). A DNA can also be introduced into a cell via lipofection, infection, or transformation. Electroporation and/or lipofection can be used to transfect fibroblast cells.

[0452] Expression of a transgene can be verified by an expression assay, for example, qPCR or by measuring levels of RNA. Expression level can be indicative also of copy number. For example, if expression levels are extremely high, this can indicate that more than one copy of a transgene was integrated in a genome. Alternatively, high expression can indicate that a transgene was integrated in a highly transcribed area, for example, near a highly expressed promoter. Expression can also be verified by measuring protein levels, such as through Western blotting.

[0453] Site Specific Insertion

[0454] Inserting one or more transgenes in any of the methods disclosed herein can be site-specific. For example, one or more transgenes can be inserted adjacent to a promoter, for example, adjacent to or near a Rosa26 promoter.

[0455] Modification of a targeted locus of a cell can be produced by introducing DNA into cells, where the DNA has homology to the target locus. DNA can include a marker gene, allowing for selection of cells comprising the integrated construct. Homologous DNA in a target vector can recombine with a chromosomal DNA at a target locus. A marker gene can be flanked on both sides by homologous DNA sequences, a 3′ recombination arm, and a 5′ recombination arm.

[0456] A variety of enzymes can catalyze insertion of foreign DNA into a host genome. For example, site-specific recombinases can be clustered into two protein families with distinct biochemical properties, namely tyrosine recombinases (in which DNA is covalently attached to a tyrosine residue) and serine recombinases (where covalent attachment occurs at a serine residue). In some cases, recombinases can comprise Cre, fC31 integrase (a serine recombinase derived from Streptomyces phage fC31), or bacteriophage derived site-specific recombinases (including Flp, lambda integrase, bacteriophage HK022 recombinase, bacteriophage R4 integrase and phage TP901-1 integrase).

[0457] Expression control sequences can also be used in constructs. For example, an expression control sequence can comprise a constitutive promoter, which is expressed in a wide variety of cell types. For example, among suitable strong constitutive promoters and/or enhancers are expression control sequences from DNA viruses (e.g., SV40, polyoma virus, adenoviruses, adeno-associated virus, pox viruses, CMV, HSV, etc.) or from retroviral LTRs. Tissue-specific promoters can also be used and can be used to direct expression to specific cell lineages. While experiments discussed in the Examples below will be conducted using a Rosa26 gene promoter, other Rosa26-related promoters capable of directing gene expression can be used to yield similar results, as will be evident to those of skill in the art. Therefore, the description herein is not meant to be limiting, but rather disclose one of many possible examples. In some cases, a shorter Rosa26 5′-upstream sequences, which can nevertheless achieve the same degree of expression, can be used. Also useful are minor DNA sequence variants of a Rosa26 promoter, such as point mutations, partial deletions or chemical modifications.

[0458] A Rosa26 promoter is expressible in mammals. For example, sequences that are similar to the 5′ flanking sequence of a pig Rosa26 gene, including, but not limited to, promoters of Rosa26 homologues of other species (such as human, cattle, mouse, sheep, goat, rabbit and rat), can also be used. A Rosa26 gene can be sufficiently conserved among different mammalian species and other mammalian Rosa26 promoters can also be used.

[0459] The CRISPR/Cas system can be used to perform site specific insertion. For example, a nick on an insertion site in the genome can be made by CRISPR/Cas to facilitate the insertion of a transgene at the insertion site.

[0460] The methods described herein, can utilize techniques which can be used to allow a DNA or RNA construct entry into a host cell include, but are not limited to, calcium phosphate/DNA coprecipitation, microinjection of DNA into a nucleus, electroporation, bacterial protoplast fusion with intact cells, transfection, lipofection, infection, particle bombardment, sperm mediated gene transfer, or any other technique known by one skilled in the art.

[0461] Certain aspects disclosed herein can utilize vectors. Any plasmids and vectors can be used as long as they are replicable and viable in a selected host. Vectors known in the art and those commercially available (and variants or derivatives thereof) can be engineered to include one or more recombination sites for use in the methods. Vectors that can be used include, but not limited to eukaryotic expression vectors such as pFastBac, pFastBacHT, pFastBacDUAL, pSFV, and pTet-Splice (Invitrogen), pEUK-C1, pPUR, pMAM, pMAMneo, pBI101, pBI121, pDR2, pCMVEBNA, and pYACneo (Clontech), pSVK3, pSVL, pMSG, pCH110, and pKK232-8 (Pharmacia, Inc.), p3′SS, pXT1, pSG5, pPbac, pMbac, pMClneo, and pOG44 (Stratagene, Inc.), and pYES2, pAC360, pBlueBa-cHis A, B, and C, pVL1392, pBlueBac111, pCDM8, pcDNA1, pZeoSV, pcDNA3, pREP4, pCEP4, and pEBVHis (Invitrogen, Corp.), and variants or derivatives thereof.

[0462] These vectors can be used to express a gene, e.g., a transgene, or portion of a gene of interest. A gene of portion or a gene can be inserted by using known methods, such as restriction enzyme-based techniques.

[0463] Making a Similar Genetically Modified Non-Human Animal Using Cell Nuclear Transfer

[0464] An alternative method of making a genetically modified non-human animal can be by cell nuclear transfer. A method of making genetically modified non-human animals can comprise a) producing a cell with reduced expression of one or more genes and/or comprise exogenous polynucleotides disclosed herein; b) providing a second cell and transferring a nucleus of the resulting cell from a) to the second cell to generate an embryo generating an embryo; c) growing the embryo into the genetically modified non-human animal. A cell in this method can be an enucleated cell. The cell of a) can be made using any methods, e.g., gene disruption and/or insertion described herein or known in the art.

[0465] This method can be used to make a similar genetically modified non-human animal disclosed herein. For example, a method of making a genetically modified non-human animal can comprise: a) producing a cell with reduced expression of NLRC5, TAP1 and/or C3; b) providing a second cell and transferring a nucleus of the resulting cell from a) to the second cell to generate an embryo; and c) growing the embryo to the genetically modified non-human animal. A cell in this method can be an enucleated cell.

[0466] Cells used in this method can be from any disclosed genetically modified cells as described herein. For example, disrupted genes are not limited to NRLC5, TAP1, and/or C3. Other combinations of gene disruptions and transgenes can be found throughout disclosure herein. For example, a method can comprise providing a first cell from any non-human animal disclosed herein; providing a second cell; transferring a nucleus of the first cell of a) to the second cell of b); generating an embryo from the product of c); and growing the embryo to the genetically modified non-human animal.

[0467] A cell of a) in the methods disclosed herein can be a zygote. The zygote can be formed by joining: i) of a sperm of a wild-type non-human animal and an ovum of a wild-type non-human animal; ii) a sperm of a wild-type non-human animal and an ovum of a genetically modified non-human animal; iii) a sperm of a genetically modified non-human animal and an ovum of a wild-type non-human animal; and/or iv) a sperm of a genetically modified non-human animal and an ovum of a genetically modified non-human animal. A non-human animal can be a pig.

[0468] One or more genes in a cell of a) in the methods disclosed herein can be disrupted by generating breaks at desired locations in the genome. For example, breaks can be double-stranded breaks (DSBs). DSBs can be generated using a nuclease comprising Cas (e.g., Cas9), ZFN, TALEN, and maganuclease. Nuclease can be a naturally-existing or a modified nuclease. A nucleic acid encoding a nuclease can be delivered to a cell, where the nuclease is expressed. Cas9 and guide RNA targeting a gene in a cell can be delivered to the cell. In some cases, mRNA molecules encoding Cas9 and guide RNA can be injected into a cell. In some cases, a plasmid encoding Cas9 and a different plasmid encoding guide RNA can be delivered into a cell (e.g., by infection). In some cases, a plasmid encoding both Cas9 and guide RNA can be delivered into a cell (e.g., by infection).

[0469] As described above, following DSBs, one or more genes can be disrupted by DNA repairing mechanisms, such as homologous recombination (HR) and/or nonhomologous end-joining (NHEJ). A method can comprise inserting one or more transgenes to a genome of the cell of a). One or more transgenes can comprise ICP47, CD46, CD55, CD59, HLA-E, HLA-G (e.g., HLA-G1, HLA-G2, HLA-G3, HLA-G4, HLA-G5, HLA-G6, or HLA-G7), B2M, any functional fragments thereof, and/or any combination thereof.

[0470] The methods provided herein can comprise inserting one or more transgenes where the one or more transgenes can be any transgene in any non-human animal or genetically modified cell disclosed herein.

[0471] Also disclosed herein are methods of making a non-human animal using a cell from a genetically modified non-human animal. A cell can be from any genetically modified non-human animal disclosed herein. A method can comprise: a) providing a cell from a genetically identified non-human animal; b) providing a cell; c) transferring a nucleus of the cell of a) to the cell of b); c) generating an embryo from the product of c); and d) growing the embryo to the genetically modified non-human animal. A cell of this method can be an enucleated cell.

[0472] Further, cells of a) in the methods can be any cell from a genetically modified non-human animal. For example, a cell of a) in methods disclosed herein can be a somatic cell, such as a fibroblast cell or a fetal fibroblast cell.

[0473] An enucleated cell in the methods can be any cell from an organism. For example, an enucleated cell is a porcine cell. An enucleated cell can be an ovum, for example, an enucleated unfertilized ovum.

[0474] Genetically modified non-human animal disclosed herein can be made using any suitable techniques known in the art. For example, these techniques include, but are not limited to, microinjection (e.g., of pronuclei), sperm-mediated gene transfer, electroporation of ova or zygotes, and/or nuclear transplantation.

[0475] A method of making similar genetically modified non-human animals can comprise a) disrupting one or more genes in a cell, b) generating an embryo using the resulting cell of a); and c) growing the embryo into the genetically modified non-human animal.

[0476] A cell of a) in the methods disclosed herein can be a somatic cell. There is no limitation on a type or source of a somatic cell. For example, it can be from a pig or from cultured cell lines or any other viable cell. A cell can also be a dermal cell, a nerve cell, a cumulus cell, an oviduct epithelial cell, a fibroblast cell (e.g., a fetal fibroblast cell), or hepatocyte. A cell of a) in the methods disclosed herein can be from a wild-type non-human animal, a genetically modified non-human animal, or a genetically modified cell. Furthermore, a cell of b) can be an enucleated ovum (e.g., an enucleated unfertilized ovum).

[0477] Enucleation can also be performed by known methods. For example, metaphase II oocytes can be placed in either HECM, optionally containing or containing about 7-10 micrograms per milliliter cytochalasin B, for immediate enucleation, or can be placed in a suitable medium (e.g., an embryo culture medium such as CRlaa, plus 10% estrus cow serum), and then enucleated later (e.g., not more than 24 hours later or 16-18 hours later). Enucleation can also be accomplished microsurgically using a micropipette to remove the polar body and the adjacent cytoplasm. Oocytes can then be screened to identify those of which have been successfully enucleated. One way to screen oocytes can be to stain the oocytes with or with about 3-10 microgram per milliliter 33342 Hoechst dye in suitable holding medium, and then view the oocytes under ultraviolet irradiation for less than 10 seconds. Oocytes that have been successfully enucleated can then be placed in a suitable culture medium, for example, CRlaa plus 10% serum. The handling of oocytes can also be optimized for nuclear transfer.

[0478] The embryos generated herein can be transferred to surrogate non-human animals (e.g., pigs) to produce offspring (e.g., piglets). For example, the embryos can be transferred to the oviduct of recipient gilts on the day or 1 day after estrus e.g., following mid-line laparotomy under general anesthesia. Pregnancy can be diagnosed, e.g., by ultrasound. Pregnancy can be diagnosed after or after about 28 days from the transfer. The pregnancy can then checked at or at about 2-week intervals by ultrasound examination. All of the microinjected offspring (e.g., piglets) can be delivered by natural birth. Information of the pregnancy and delivery (e.g., time of pregnancy, rates of pregnancy, number of offspring, survival rate, etc.) can be documented. The genotypes and phenotypes of the offspring can be measured using any methods described through the application such as sequencing (e.g., next-generation sequencing). Sequencing can also be Zas 258 sequencing, as shown in FIG. 109 and FIG. 110 A. Sequencing products can also be verified by electrophoresis of the amplification product, FIG. 110 B. For example, the CM1F sequencing is shown in FIG. 111 A and the electrophoresis product is shown in FIG. 111 B.

[0479] Cultured cells can be used immediately for nuclear transfer (e.g., somatic cell nuclear transfer), embryo transfer, and/or inducing pregnancy, allowing embryos derived from stable genetic modifications give rise to offspring (e.g., piglets). Such approach can reduce time and cost, e.g., months of costly cell screening that may result in genetically modified cells fail to produce live and/or healthy piglets.

[0480] Embryo growing and transferring can be performed using standard procedures used in the embryo growing and transfer industry. For example, surrogate mothers can be used. Embryos can also be grown and transferred in culture, for example, by using incubators. In some cases, an embryo can be transferred to an animal, e.g., a surrogate animal, to establish a pregnancy.

[0481] It can be desirable to replicate or generate a plurality of genetically modified non-human animals that have identical genotypes and/or phenotypes disclosed herein. For example, a genetically modified non-human animal can be replicated by breeding (e.g., selective breeding). A genetically modified non-human animal can be replicated by nuclear transfer (e.g., somatic cell nuclear transfer) or introduction of DNA into a cell (e.g., oocytes, sperm, zygotes or embryonic stem cells). These methods can be reproduced a plurality of times to replicate or generate a plurality of a genetically modified non-human animal disclosed herein. In some cases, cells can be isolated from the fetuses of a pregnant genetically modified non-human animal. The isolated cells (e.g., fetal cells) can be used for generating a plurality of genetically modified non-human animals similar or identical to the pregnant animal. For example, the isolated fetal cells can provide donor nuclei for generating genetically modified animals by nuclear transfer, (e.g., somatic cell nuclear transfer).

[0482] V. Methods of Use

[0483] Cells, organs, and/or tissues can be extracted from a non-human animal as described herein. Cells, organs, and/or tissues can be genetically altered ex vivo and used accordingly. These cells, organs, and/or tissues can be used for cell-based therapies. These cells, organs, and/or tissues can be used to treat or prevent disease in a recipient (e.g., a human or non-human animal). Surprisingly, the genetic modifications as described herein can help prevent rejection. Additionally, cells, organs, and/or tissues can be made into tolerizing vaccines to also help tolerize the immune system to transplantation. Further, tolerizing vaccines can temper the immune system, including, abrogating autoimmune responses.

[0484] Disclosed herein are methods for treating a disease in a subject in need thereof can comprise administering a tolerizing vaccine to the subject; administering a pharmaceutical agent that inhibits T cell activation to the subject; and transplanting a genetically modified cell to the subject. The pharmaceutical agent that inhibits T cell activation can be an antibody. The antibody can be an anti-CD40 antibody disclosed herein. The anti-CD40 antibody can be an antagonistic antibody. The anti-CD40 antibody can be an anti-CD40 antibody that specifically binds to an epitope within the amino acid sequence: EPPTACREKQYLINSQCCSLCQPGQKLVSDCTEFTETECLPCGESEFLDTWNRETHCHQH KYCDPNLGLRVQQKGTSETDTICTCEEGWHCTSEACESCV (SEQ ID NO: 487). The anti-CD40 antibody can be an anti-CD40 antibody that specifically binds to an epitope within the amino acid sequence: EKQYLINSQCCSLCQPGQKLVSDCTEFTETECL (SEQ ID NO: 488). The anti-CD40 antibody can be a Fab′ anti-CD40L monoclonal antibody fragment CDP7657. The anti-CD-40 antibody can be a FcR-engineered, Fc silent anti-CD40L monoclonal domain antibody. The cell transplanted to the subject can be any genetically modified cell described throughout the application. The tissue or organ transplanted to the subject can comprise one or more of the genetically modified cells. In some cases, the methods can further comprise administering one or more immunosuppression agent described in the application, such as further comprising providing to the recipient one or more of a B-cell depleting antibody, an mTOR inhibitor, a TNF-alpha inhibitor, a IL-6 inhibitor, a nitrogen mustard alkylating agent (e.g., cyclophosphamide), and a complement C3 or C5 inhibitor.

[0485] Also disclosed herein are methods for treating a disease, comprising transplanting one or more cells to a subject in need thereof. The one or more cells can be any genetically modified cells disclosed herein. In some cases, the methods can comprise transplanting a tissue or organ comprising the one or more cells (e.g., genetically modified cells) to the subject in need thereof.

[0486] Described herein are methods of treating or preventing a disease in a recipient (e.g., a human or non-human animal) comprising transplanting to the recipient (e.g., a human or non-human animal) one or more cells (including organs and/or tissues) derived from a genetically modified non-human animal comprising one or more genes with reduced expression. One or more cells can be derived from a genetically modified non-human animal as described throughout.

[0487] The methods disclosed herein can be used for treating or preventing disease including, but not limited to, diabetes, cardiovascular diseases, lung diseases, liver diseases, skin diseases, or neurological disorders. For example, the methods can be used for treating or preventing Parkinson's disease or Alzheimer's disease. The methods can also be used for treating or preventing diabetes, including type 1, type 2, cystic fibrosis related, surgical diabetes, gestational diabetes, mitochondrial diabetes, or combination thereof. In some cases, the methods can be used for treating or preventing hereditary diabetes or a form of hereditary diabetes. Further, the methods can be used for treating or preventing type 1 diabetes. The methods can also be used for treating or preventing type 2 diabetes. The methods can be used for treating or preventing pre-diabetes.

[0488] For example, when treating diabetes, genetically modified splenocytes can be fixed with ECDI and given to a recipient. Further, genetically modified pancreatic islet cells can be grafted into the same recipient to produce insulin. Genetically modified splenocytes and pancreatic islet cells can be genetically identical and can also be derived from the same genetically modified non-human animal.

[0489] Provided herein include i) genetically modified cells, tissues or organs for use in administering to a subject in need thereof to treat a condition in the subject; ii) a tolerizing vaccine for use in immunotolerizing the subject to a graft, where the tolerizing vaccine comprise a genetically modified cell, tissue, or organ; iii) one or more pharmaceutical agents for use in inhibiting T cell activation, B cell activation, dendritic cell activation, or a combination thereof in the subject; or iv) any combination thereof.

[0490] Also provided herein include genetically modified cells, tissues or organs for use in administering to a subject in need thereof to treat a condition in the subject. The subject can have been or become tolerized to the genetically modified cell, tissue or organ by use of a tolerizing vaccine. Further, the subject can be administered one or more pharmaceutical agents that inhibit T cell activation, B cell activation, dendritic cell activation, or a combination thereof.

[0491] Transplantation

[0492] The methods disclosed herein can comprise transplanting. Transplanting can be autotransplanting, allotransplanting, xenotransplanting, or any other transplanting. For example, transplanting can be xenotransplanting. Transplanting can also be allotransplanting. “Xenotransplantation” and its grammatical equivalents as used herein can encompass any procedure that involves transplantation, implantation, or infusion of cells, tissues, or organs into a recipient, where the recipient and donor are different species. Transplantation of the cells, organs, and/or tissues described herein can be used for xenotransplantation in into humans. Xenotransplantation includes but is not limited to vascularized xenotransplant, partially vascularized xenotransplant, unvascularized xenotransplant, xenodressings, xenobandages, and nanostructures.

[0493] “Allotransplantation” and its grammatical equivalents as used herein can encompass any procedure that involves transplantation, implantation, or infusion of cells, tissues, or organs into a recipient, where the recipient and donor are the same species. Transplantation of the cells, organs, and/or tissues described herein can be used for allotransplantation in into humans. Allotransplantation includes but is not limited to vascularized allotransplant, partially vascularized allotransplant, unvascularized allotransplant, allodressings, allobandages, and allostructures.

[0494] After treatment (e.g., any of the treatment as disclosed herein), transplant rejection can be improved as compared to when one or more wild-type cells is transplanted into a recipient. For example, transplant rejection can be hyperacute rejection. Transplant rejection can also be acute rejection. Other types of rejection can include chronic rejection. Transplant rejection can also be cell-mediated rejection or T cell-mediated rejection. Transplant rejection can also be natural killer cell-mediated rejection.

[0495] In some cases, a subject is sensitized to major histocompatibility complex (MHC) or human leukocyte antigen (HLA). For example, a subject may have a positive result on a panel reactive antibody (PRA) screen. In some cases, a subject may have a calculated PRA (cPRA) score from 0.1 to 100%. A cPRA score can be or can be about from 0.1 to 10%, 5% to 30%, 10% to 50%, 20% to 80%, 40% to 90%, 50% to 100%. In some cases, a subject with a positive PRA screen may be transplanted with the genetically modified cells of the invention.

[0496] In some cases, a subject may have a quantification performed of their PRA level by a single antigen bead (SAB) test. An SAB test can identify MHC or HLA for which a subject has antibodies to.

[0497] “Improving” and its grammatical equivalents as used herein can mean any improvement recognized by one of skill in the art. For example, improving transplantation can mean lessening hyperacute rejection, which can encompass a decrease, lessening, or diminishing of an undesirable effect or symptom.

[0498] The disclosure describes methods of treatment or preventing diabetes or prediabetes. For example, the methods include but are not limited to, administering one or more pancreatic islet cell(s) from a donor non-human animal described herein to a recipient, or a recipient in need thereof. The methods can be transplantation or, in some cases, xenotransplantation. The donor animal can be a non-human animal. A recipient can be a primate, for example, a non-human primate including, but not limited to, a monkey. A recipient can be a human and in some cases, a human with diabetes or pre-diabetes. In some cases, whether a patient with diabetes or pre-diabetes can be treated with transplantation can be determined using an algorithm, e.g., as described in Diabetes Care 2015; 38:1016-1029, which is incorporated herein by reference in its entirety.

[0499] The methods can also include methods of xenotransplantation where the transgenic cells, tissues and/or organs, e.g., pancreatic tissues or cells, provided herein are transplanted into a primate, e.g., a human, and, after transplant, the primate requires less or no immunosuppressive therapy. Less or no immunosuppressive therapy includes, but is not limited to, a reduction (or complete elimination of) in dose of the immunosuppressive drug(s)/agent(s) compared to that required by other methods; a reduction (or complete elimination of) in the number of types of immunosuppressive drug(s)/agent(s) compared to that required by other methods; a reduction (or complete elimination of) in the duration of immunosuppression treatment compared to that required by other methods; and/or a reduction (or complete elimination of) in maintenance immunosuppression compared to that required by other methods.

[0500] The methods disclosed herein can be used for treating or preventing disease in a recipient (e.g., a human or non-human animal). A recipient can be any non-human animal or a human. For example, a recipient can be a mammal. Other examples of recipient include but are not limited to primates, e.g., a monkey, a chimpanzee, a bamboo, or a human. If a recipient is a human, the recipient can be a human in need thereof. The methods described herein can also be used in non-primate, non-human recipients, for example, a recipient can be a pet animal, including, but not limited to, a dog, a cat, a horse, a wolf, a rabbit, a ferret, a gerbil, a hamster, a chinchilla, a fancy rat, a guinea pig, a canary, a parakeet, or a parrot. If a recipient is a pet animal, the pet animal can be in need thereof. For example, a recipient can be a dog in need thereof or a cat in need thereof.

[0501] Transplanting can be by any transplanting known to the art. Graft can be transplanted to various sites in a recipient. Sites can include, but not limited to, liver subcapsular space, splenic subcapsular space, renal subcapsular space, omentum, bursa omentalis, gastric or intestinal submucosa, vascular segment of small intestine, venous sac, testis, brain, spleen, or cornea. For example, transplanting can be subcapsular transplanting. Transplanting can also be intramuscular transplanting. Transplanting can be intraportal transplanting.

[0502] Transplanting can be of one or more cells, tissues, and/or organs from a human or non-human animal. For example, the tissue and/or organs can be, or the one or more cells can be from, a brain, heart, lungs, eye, stomach, pancreas, kidneys, liver, intestines, uterus, bladder, skin, hair, nails, ears, glands, nose, mouth, lips, spleen, gums, teeth, tongue, salivary glands, tonsils, pharynx, esophagus, large intestine, small intestine, rectum, anus, thyroid gland, thymus gland, bones, cartilage, tendons, ligaments, suprarenal capsule, skeletal muscles, smooth muscles, blood vessels, blood, spinal cord, trachea, ureters, urethra, hypothalamus, pituitary, pylorus, adrenal glands, ovaries, oviducts, uterus, vagina, mammary glands, testes, seminal vesicles, penis, lymph, lymph nodes or lymph vessels. The one or more cells can also be from a brain, heart, liver, skin, intestine, lung, kidney, eye, small bowel, or pancreas. The one or more cells are from a pancreas, kidney, eye, liver, small bowel, lung, or heart. The one or more cells can be from a pancreas. The one or more cells can be pancreatic islet cells, for example, pancreatic β cells. Further, the one or more cells can be pancreatic islet cells and/or cell clusters or the like, including, but not limited to pancreatic α cells, pancreatic β cells, pancreatic δ cells, pancreatic F cells (e.g., PP cells), or pancreatic ε cells. In one instance, the one or more cells can be pancreatic α cells. In another instance, the one or more cells can be pancreatic β cells.

[0503] As discussed above, a genetically modified non-human animal can be used in xenograft (e.g., cells, tissues and/or organ) donation. Solely for illustrative purposes, genetically modified non-human animals, e.g., pigs, can be used as donors of pancreatic tissue, including but not limited to, pancreatic islets and/or islet cells. Pancreatic tissue or cells derived from such tissue can comprise pancreatic islet cells, or islets, or islet-cell clusters. For example, cells can be pancreatic islets which can be transplanted. More specifically, cells can be pancreatic β cells. Cells also can be insulin-producing. Alternatively, cells can be islet-like cells. Islet cell clusters can include any one or more of α, β, δ, PP or ε cells. A disease to be treated by methods and compositions herein can be diabetes. Transplantable grafts can be pancreatic islets and/or cells from pancreatic islets. A modification to a transgenic animal can be to the pancreatic islets or cells from pancreatic islets. In some cases, pancreatic islets or cells from a pancreatic islet can be porcine. In some cases, cells from a pancreatic islet include pancreatic β cells.

[0504] Donor non-human animals can be at any stage of development including, but not limited to, embryonic, fetal, neonatal, young and adult. For example, donor cells islet cells can be isolated from adult non-human animals. Donor cells, e.g., islet cells, can also be isolated from fetal or neonatal non-human animals. Donor non-human animals can be under the age of 10, 9, 8, 7, 6, 5, 4, 3, 2, or 1 year(s). For example, islet cells can be isolated from a non-human animal under the age of 6 years. Islet cells can also be isolated from a non-human animal under the age of 3 years. Donors can be non-human animals and can be any age from or from about 0 (including a fetus) to 2; 2 to 4; 4 to 6; 6 to 8; or 8 to 10 years. A non-human animal can be older than or than about 10 years. Donor cells can be from a human as well.

[0505] Islet cells can be isolated from non-human animals of varying ages. For example, islet cells can be isolated from or from about newborn to 2 year old non-human animals. Islets cells can also be isolated from or from about fetal to 2 year old non-human animals. Islets cells can be isolated from or from about 6 months old to 2 year old non-human animals. Islets cells can also be isolated from or from about 7 months old to 1 year old non-human animals. Islets cells can be isolated from or from about 2-3 year old non-human animals. In some cases, non-human animals can be less than 0 years (e.g., a fetus or embryo). In some cases, neonatal islets can be more hearty and consistent post-isolation than adult islets, can be more resistant to oxidative stress, can exhibit significant growth potential (likely from a nascent islet stem cell subpopulation), such that they can have the ability to proliferate post-transplantation and engraftment in a transplantation site.

[0506] With regards to treating diabetes, neonatal islets can have the disadvantage that it can take them up to or up to about 4-6 weeks to mature enough such that they produce significant levels of insulin, but this can be overcome by treatment with exogenous insulin for a period sufficient for the maturation of the neonatal islets. In xenograft transplantation, survival and functional engraftment of neo-natal islets can be determined by measuring donor-specific c-peptide levels, which are easily distinguished from any recipient endogenous c-peptide.

[0507] As discussed above, adult cells can be isolated. For example, adult non-human animal islets, e.g., adult porcine cells, can be isolated. Islets can then be cultured for or for about 1-3 days prior to transplantation in order to deplete the preparation of contaminating exocrine tissue. Prior to treatment, islets can be counted, and viability assessed by double fluorescent calcein-AM and propidium iodide staining. Islet cell viability >75% can be used. However, cell viability greater than or greater than about 40%, 50%, 60%, 70%, 80%, 90%, 95%, 99% can be used. For example, cells that exhibit viability from or from about 40% to 50%; 50% to 60%; 60% to 70%; 70% to 80%; 80% to 90%; 90% to 95%, or 90% to 100% can be used. Additionally, purity can be greater than or greater than about 80% islets/whole tissue. Purity can also be at least or at least about 40%, 50%, 60%, 70%, 80%, 90%, 95%, or 99% islets/whole tissue. For example, purity can be from or can be from about 40% to 50%; 50% to 60%; 60% to 70%; 70% to 80%; 80% to 90%; 90% to 100%; 90% to 95%, or 95% to 100%.

[0508] Functional properties of islets, including glucose-stimulated insulin secretion as assed by dynamic perifusion and viability, can be determined in vitro prior to treatment (Balamurugan, 2006). For example, non-human animal islet cells, e.g., transgenic porcine islet cells can be cultured in vitro to expand, mature, and/or purify them so that they are suitable for grafting.

[0509] Islet cells can also be isolated by standard collagenase digestion of minced pancreas. For example, using aseptic techniques, glands can be distended with tissue dissociating enzymes (a mixture of purified enzymes formulated for rapid dissociation of a pancreas and maximal recovery of healthy, intact, and functional islets of Langerhans, where target substrates for these enzymes are not fully identified, but are presumed to be collagen and non-collagen proteins, which comprise intercellular matrix of pancreatic acinar tissue) (1.5 mg/ml), trimmed of excess fat, blood vessels and connective tissue, minced, and digested at 37 degree C. in a shaking water bath for 15 minutes at 120 rpm. Digestion can be achieved using lignocaine mixed with tissue dissociating enzymes to avoid cell damage during digestion. Following digestion, the cells can be passed through a sterile 50 mm to 1000 mm mesh, e.g., 100 mm, 200 mm, 300 mm, 400 mm, 500 mm, 600 mm, 700 mm, 800 mm, 900 mm, or 1000 mm mesh into a sterile beaker. Additionally, a second digestion process can be used for any undigested tissue.

[0510] Islets can also be isolated from the adult pig pancreas (Brandhorst et al., 1999). The pancreas is retrieved from a suitable source pig, pen-pancreatic tissue is removed, the pancreas is divided into the splenic lobe and in the duodenal/connecting lobe, the ducts of each lobes are cannulated, and the lobes are distended with tissue dissociating enzymes. The pancreatic lobes are placed into a Ricordi chamber, the temperature is gradually increased to 28 to 32° C., and the pancreatic lobes are dissociated by means of enzymatic activity and mechanical forces. Liberated islets are separated from acinar and ductal tissue using continuous density gradients. Purified pancreatic islets are cultured for or for about 2 to 7 days, subjected to characterization, and islet products meeting all specifications are released for transplantation (Korbutt et al., 2009).

[0511] Donor cells, organs, and/or tissues before, after, and/or during transplantation can be functional. For example, transplanted cells, organs, and/or tissues can be functional for at least or at least about 1, 5, 10, 20, 30 days after transplantation. Transplanted cells, organs, and/or tissues can be functional for at least or at least about 1, 2, 3, 4, 5, 6, 7, 8, 9, 10, 11, or 12 months after transplantation. Transplanted cells, organs, and/or tissues can be functional for at least or at least about 1, 2, 3, 4, 5, 6, 7, 8, 9, 10, 15, 20, 25, or 30 years after transplantation. In some cases, transplanted cells, organs, and/or tissues can be functional for up to the lifetime of a recipient. This can indicate that transplantation was successful. This can also indicate that there is no rejection of the transplanted cells, tissues, and/or organs.

[0512] Further, transplanted cells, organs, and/or tissues can function at 100% of its normal intended operation. Transplanted cells, organs, and/or tissues can also function at least or at least about 50, 60, 65, 70, 75, 80, 85, 90, 95, 99, or 100% of its normal intended operation, e.g., from or from about 50 to 60; 60 to 70; 70 to 80; 80 to 90; 90 to 100%. In certain instances, the transplanted cells, organs, and/or tissues can function at greater 100% of its normal intended operation (when compared to a normal functioning non-transplanted cell, organ, or tissue as determined by the American Medical Association). For example, the transplanted cells, organs, and/or tissues can function at or at about 110, 120, 130, 140, 150, 175, 200% or greater of its normal intended operation, e.g., from or from about 100 to 125; 125 to 150; 150 to 175; 175 to 200%.

[0513] In certain instances, transplanted cells can be functional for at least or at least about 1 day. Transplanted cells can also functional for at least or at least about 7 days. Transplanted cells can be functional for at least or at least about 14 days. Transplanted cells can be functional for at least or at least about 21 days. Transplanted cells can be functional for at least or at least about 28 days. Transplanted cells can be functional for at least or at least about 60 days.

[0514] Another indication of successful transplantation can be the days a recipient does not require immunosuppressive therapy. For example, after treatment (e.g., transplantation) provided herein, a recipient can require no immunosuppressive therapy for at least or at least about 1, 5, 10, 100, 365, 500, 800, 1000, 2000, 4000 or more days. This can indicate that transplantation was successful. This can also indicate that there is no rejection of the transplanted cells, tissues, and/or organs.

[0515] In some cases, a recipient can require no immunosuppressive therapy for at least or at least about 1 day. A recipient can also require no immunosuppressive therapy for at least or at least about 7 days. A recipient can require no immunosuppressive therapy for at least or at least about 14 days. A recipient can require no immunosuppressive therapy for at least or at least about 21 days. A recipient can require no immunosuppressive therapy for at least or at least about 28 days. A recipient can require no immunosuppressive therapy for at least or at least about 60 days. Furthermore, a recipient can require no immunosuppressive therapy for at least or at least about 1, 2, 3, 4, 5, 6, 7, 8, 9, 10, 15, 20, 30, 40, or 50 years, e.g., for at least or at least about 1 to 2; 2 to 3; 3 to 4; 4 to 5; 1 to 5; 5 to 10; 10 to 15; 15 to 20; 20 to 25; 25 to 50 years.

[0516] Another indication of successful transplantation can be the days a recipient requires reduced immunosuppressive therapy. For example, after the treatment provided herein, a recipient can require reduced immunosuppressive therapy for at least or at least about 1, 5, 10, 50, 100, 200, 300, 365, 400, 500 days, e.g., for at least or at least about 1 to 30; 30 to 120; 120 to 365; 365 to 500 days. This can indicate that transplantation was successful. This can also indicate that there is no or minimal rejection of the transplanted cells, tissues, and/or organs.

[0517] For example, a recipient can require reduced immunosuppressive therapy for at least or at least about 1 day. A recipient can also require reduced immunosuppressive therapy for at least 7 days. A recipient can require reduced immunosuppressive therapy for at least or at least about 14 days. A recipient can require reduced immunosuppressive therapy for at least or at least about 21 days. A recipient can require reduced immunosuppressive therapy for at least or at least about 28 days. A recipient can require reduced immunosuppressive therapy for at least or at least about 60 days. Furthermore, a recipient can require reduced immunosuppressive therapy for at least or at least about 1, 2, 3, 4, 5, 6, 7, 8, 9, 10, 15, 20, 30, 40, or 50 years, e.g., for at least or at least about 1 to 2; 2 to 3; 3 to 4; 4 to 5; 1 to 5; 5 to 10; 10 to 15; 15 to 20; 20 to 25; 25 to 50 years.

[0518] “Reduced” and its grammatical equivalents as used herein can refer to less immunosuppressive therapy compared to a required immunosuppressive therapy when one or more wild-type cells is transplanted into a recipient.

[0519] A donor (e.g., a donor for a transplant graft and/or a cell in a tolerizing vaccine) can be a mammal. A donor of allografts can be an unmodified human cell, tissue, and/or organ, including but not limited to pluripotent stem cells. A donor of xenografts can be any cell, tissue, and/or organ from a non-human animal, such as a mammal. In some cases, the mammal can be a pig.

[0520] The methods herein can further comprise treating a disease by transplanting one or more donor cells to an immunotolerized recipient (e.g., a human or a non-human animal).

### EXAMPLES

### Example 1: Generating Plasmids Expressing Guide RNA for Disrupting GGTA1, CMAH, NLRC5, B4GALNT2, and/or C3 Genes in Pigs

[0521] Genetically modified pigs will provide transplant grafts that induce low or no immuno-rejection in a recipient, and/or cells as tolerizing vaccines that enhance immuno-tolerization in the recipient. Such pigs will have reduced expression of any genes that regulate MHC molecules (e.g., MHC I molecules and/or MHC II molecules) compared to a non-genetically modified counterpart animal. Reducing expression of such genes will result in reduced expression and/or function of MHC molecules. These genes will be one or more of the following: components of an MHC I-specific enhanceosome, transporters of a MHC I-binding peptide, natural killer group 2D ligands, CXCR 3 ligands, C3, and CIITA. Additionally or alternatively, such pigs will comprise reduced protein expression of an endogenous gene that is not expressed in human (e.g., CMAH, GGTA1 and/or B4GALNT2). For example, the pigs will comprise reduced protein expression of one or more of the following: NLRC5, TAP1, C3, CXCL10, MICA, MICB, CIITA, CMAH, GGTA1 and/or B4GALNT2. In some cases, pigs will comprise reduced protein expression of NLRC5, C3, CXCL10, CMAH, GGTA1 and/or B4GALNT2.

[0522] This example shows exemplary methods for generating plasmids for disrupting GGTA1, CMAH, NLRC5, B4GALNT2, and/or C3 genes in pigs using the CRISPR/cas9 system. The plasmids were generated using the px330 vector, which simultaneously expressed a Cas9 DNA endonuclease and a guide RNA.

[0523] The px330-U6-Chimeric BB-CBh-hSpCas9 (#42230) plasmid was obtained from Addgene in a bacterial stab culture format. The stab culture was streaked onto a pre-warmed LB agar with ampicillin plate and incubated at 37° C. overnight. The next day, a single colony was selected and inoculated in a liquid LB overnight culture with ampicillin (5 mL for mini-prep, or 80-100 mL for maxi-prep). Mini-prep was performed using Qiagen kits according to manufacturer's instructions. Plasmid was eluted in nuclease free water and stocks were stored at −20° C. The oligonucleotides designed for targeting GGTA1, CMAH, NLRC5, C3, and B4GALNT2 are shown in Table 6. The oligonucleotides were synthesized by IDT. FIGS. 7A-7E, 8A-8E, 9A-9E, 10A-10E, and 11A-11E, show the cloning strategies for cloning plasmids targeting GGTA1 (i.e., px330/Gal2-1) (FIGS. 7A-7E), CMAH (i.e., px330/CM1F) (FIGS. 8A-8E), NLRC5 (i.e., px330/NL1_First) (FIGS. 9A-9E), C3 (i.e., px330/C3-5) (FIGS. 10A-10E), and B4GALNT2 (i.e., px330/B41_second) (FIGS. 11A-11E). The constructed px330 plasmids were validated by sequencing using sequencing primers shown in Table 7 and by sequencing as shown in FIG. 109. Oligonucleotides were re-suspended at 100 μM with nuclease free water and stored in the −20° C. freezer.

[0524] Vector digestion: The px330 vectors were digested in a reaction solution containing 5 μg px330 stock, 5 μL 10× FastDigest Reaction Buffer, 354 nuclease free water, and 5 μL FastDigest Bbsl enzyme (Cutsite: GAAGAC). The reaction solution was incubated at 37° C. for 15 minutes, the heat inactivated at 65° C. for 15 minutes. To desphosphorylate the vector, 0.24 (2 U; 1 U/1 pmol DNA ends) CIP was added and the resulting mixture was incubated at 37° C. for 60 minutes. The linearized plasmid was purified using Qiagen PCR Cleanup kit, and eluted with nuclease free water and stored at −20° C. until use.

[0525] Oligonucleotides Annealing and phosphorylation: a solution was made by mixing 1 μL 100 uM Forward oligonucleotide, 1 μL 100 uM Reverse oligonucleotide, 1 μL 10×T4 Ligase Buffer, 6 μL nuclease free water, 14 Polynucleotide Kinase (PNK). The resulting solution was incubated on a thermal cycler running the following program: 37° C. for 30 min, 95° C. for 5 min, ramp down to 25° C. at 0.1° C./second.

[0526] Ligation Reaction: a solution was made by mixing diluted annealed oligonucleotides 1:250 with nuclease free water, 2 μL diluted annealed oligonucleotides, 100 ng linearized/dephosphorylated px330 vector, 5 μL 10×T4 Ligase Buffer, nuclease free water to bring to 50 μL final volume, and 2.5 μL T4 DNA Ligase. The solution was incubated at room temp for 4 hours, then heat inactivated at 65° C. for 10 minutes.

[0527] Transformation: TOP10 E. coli vials were thawed from −80° C. freezer on ice for 15 minutes prior to transformation. 2 μL of the ligation reaction product was added to the cells and mixed by gently flicking the tubes. The tubes were incubated on ice for 5 minutes, heat shocked in 42° C. water bath for 30 seconds, and placed back on ice for additional 2 minutes after heat shock. 50 μL of transformed cells were plated onto an LB agar with ampicillin plate and spread with pipette tip. The plates were incubated at 37° C. overnight.

[0528] Colony PCR screening for correctly inserted oligonucleotides: 3× colonies were selected from the plate and labeled 1-3 on bottom of plate. Master mix for PCR reaction was prepared by mixing 15 μL 10× Standard Taq Reaction Buffer, 3 μL 10 mM dNTP mix, 0.5 μL 100 uM px330-F1 primer (SEQ ID No. 161 in Table 7), 0.5 μL 100 uM px330-R1 primer (SEQ ID No. 162 in Table 7), 130 μL nuclease free water, and 14 Standard Taq Polymerase. Master mix was vortexed briefly, then aliquotted 504 to 3×PCR tubes labeled 1-3. A pipette tip was dabbed into colony #1 on the agar plate and then pipetted up and down in PCR tube #1. Repeated for each colony being screened using a fresh tip for each colony. Tubes were placed in thermal cycler to run the following program: 95° C. for 5 min, 95° C. for 30 seconds, 52° C. for 30 seconds, 68° C. for 30 seconds, cycle step 2-4 for 30 cycles, 68° C. for 5 min, hold at 4° C. until use. PCR Cleanup was performed using Qiagen PCR Cleanup Kit and followed manufacturer's protocol. The product was eluted in nuclease free water.

[0529] Preparing samples for sequencing: a solution was made by mixing 120 ng PCR product, 6.4 pmols px330-F1 primer (1 μL of 6.4 μM stock), and nuclease free water that brought the final volume to 12 μL. After the sequence data was obtained, correct sequence inserts were identified. Glycerol stocks of colonies with correct inserts were prepared. On the LB agar plate labeled during colony PCR with #1-3, the correctly inserted colonies were inoculated in 5 mL LB medium with ampicillin by dabbing with a pipette tip and ejecting into the tube of medium. Liquid culture was grown out until an OD was reached between 1.0 and 1.4. 500 μL of bacterial culture was added to 500 μL of sterile 50% glycerol in a cryovial and placed immediately on dry ice until transfer to −80° C. freezer.

TABLE 6
Exemplary oligonucleotides for making guide RNA constructs
targeting GGTA1, CMAH, NLRC5, C3, GG1, and B4GALNT2

| | SEQ | | SEQ | |
|---|---|---|---|---|
| | ID | | ID | |
| Gene | No. | Forward sequence (5′ to 3′) | No. | Reverse sequence (5′ to 3′) |
| C3 | 113 | acaccgcaaggggatattcgggtttg | 114 | aaaacaaacccgaatatccccttgcg |
| c3 | 115 | acaccggcgctctttgggaacgtccg | 116 | aaaacggacgttcccaaagagcgccg |
| c3 | 117 | acaccgacgacaatggtctggcccag | 118 | aaaactgggccagaccattgtcgtcg |
| B4GALNT | 119 | acaccgtgcttttggtcctgagcgtg | 120 | aaaacacgctcaggaccaaaagcacg |
| 2 (option1) | | | | |
| B4GALNT | 121 | acaccgtcgatcctcaagatattgag | 122 | aaaactcaatatcttgaggatcgacg |
| 2 (opition2) | | | | |
| GGTA1 | 123 | acaccggggagagaagcagaggatgg | 124 | aaaaccatcctctgcttctctccccg |
| GGTA1 | 125 | acaccgctgcttgtctcaactgtaag | 126 | aaaacttacagttgagacaagcagcg |
| GGTA1 | 127 | acaccgaatacatcaacagcccagag | 128 | aaaactctgggctgttgatgtattcg |
| GGTA1 | 129 | acaccgcccagaaggttctttgttcg | 130 | aaaacgaacaaagaaccttctgggcg |
| GGTA1 | 131 | acaccgttggcagcagtgctcagagg | 132 | aaaacctctgagcactgctgccaacg |
| GGTA1 | 133 | acaccgggggccgggagccgaggtg | 134 | aaaaccacctcggctcccggcccccg |
| | | g | | |
| GGTA1 | 135 | acaccgcacccagcttctgccgatcg | 136 | aaaacgatcggcagaagctgggtgcg |
| GGTA1 | 137 | acaccgagagggggctgatcactgtg | 138 | aaaacacagtgatcagccccctctcg |
| CMAH | 139 | acaccgtagaaaaggatgaagaaaag | 140 | aaaacttttcttcatccttttctacg |
| CMAH | 141 | acaccgccaaatcttcaggagatctg | 142 | aaaacagatctcctgaagatttggcg |
| CMAH | 143 | acaccgatctgggttctgaatcccag | 144 | aaaactgggattcagaacccagatcg |
| CMAH | 145 | acaccggttctgaatcccacgggttg | 146 | aaaacaacccgtgggattcagaaccg |
| NLRC5 | 147 | acaccggcctcagaccccacacagag | 148 | aaaactctgtgtggggtctgaggccg |
| NLRC5 | 149 | acaccgtactgctgctgagcacctgg | 150 | aaaaccaggtgctcagcagcagtacg |
| NLRC5 | 151 | acaccgactgttgcagggggccccag | 152 | aaaactggggccccctgcaacagtcg |
| GG1 | 159 | gagaaaataatgaatgtcaa | 160 | ttgacattcattattttctc |

TABLE 7
Exemplary sequencing primers for px330 plasmids

| SEQ | | SEQ | |
|---|---|---|---|
| ID | Forward sequence | ID | Reverse sequence |
| No. | (5′ to 3′) | No. | (5′ to 3′) |
| 161 | gccttttgctggccat | 162 | cgggccatttaccgtaagttatg |
| | tgctc | | taacg |

### Example 2: Generating a Plasmid Expressing Guide RNA Targeting the Rosa26 Locus in Pigs

[0530] Pigs with MHC deficiencies will provide transplant grafts that induce low or no immuno-rejection in a recipient. Exogenous proteins that inhibit MHC functions will be expressed in pigs to cause MHC deficiencies. Another goal of ours further along in the project is to insert one or more exogenous polynucleotides encoding one or more proteins under the control of a ubiquitous promoter that will direct ubiquitous expression of the one or more proteins. This example show generating a plasmid expressing guide RNA targeting one of such ubiquitous promoter, Rosa26. Rosa26 promoter will direct ubiquitous expression of a gene at the Rosa26 locus. Thus transgenic pigs will be generated by inserting transgenes encoding the exogenous proteins at the Rosa26 locus, so that the gene product will be expressed in all cells in the pig. A plasmid expressing guide RNA targeting Rosa26 will be used to facilitate insertion of a transgene into the Rosa26 locus. This example shows exemplary methods for generating plasmids for targeting the Rosa26 locus in pigs using the CRISPR/cas9 system. The plasmids were generated using the px330 vector, which was be used to simultaneously express a Cas9 DNA endonuclease and a guide RNA.

[0531] Sequencing Rosa26:

[0532] For designing guide RNA targeting Rosa26 locus in a pig, Rosa26 in the pig was sequenced to provide accurate sequence information.

[0533] Primer Design: The Rosa26 reference sequence utilized to generate primers was taken from Kong et. al., Rosa26 Locus Supports Tissue-Specific Promoter Driving Transgene Expression Specifically in Pig. PLoS ONE 2014; 9(9):e107945, Li et. al., Rosa26-targeted swine models for stable gene over-expression and Cre-mediated lineage tracing. Cell Research 2014; 24(4):501-504, and Li et. al., Identification and cloning of the porcine ROSA26 promoter and its role in transgenesis. Transplantation Technology 2014:2(1). The reference sequence was then expanded by searching the pig genome database (NCBI) and by using Ensembl Genome Browser. The base sequence was separated into four 1218 base pair regions to facilitate primer design. Primers were designed using Integrated DNA Technologies' PrimerQuest Tool and then searched against the Sus scrofa reference genomic sequences using Standard Nucleotide BLAST to check for specificity. Primer length was limited to 200-250 base pairs. Primer annealing temperature was calculated using the New England Tm Calculator for a primer concentration of 1000 nM and the Taq DNA Polymerase Kit.

[0534] PCR: PCR was performed using Taq DNA Polymerase with Standard Taq Buffer (New England Biolabs). DNA template used for the PCR was extracted from cells isolated from the cloned pig. PCR conditions were 30 cycles of: 95° C., 30 seconds; 50° C., 30 seconds, 51° C. 30 seconds, 52° C. 30 seconds, 53° C. 30 seconds, 54° C. 30 seconds, 55° C. 30 seconds; and an extension step at 68° for 30 seconds. PCR products were purified using the QIAquick PCR Purification Kit (Qiagen). Primers used for sequencing are listed in Table 8.

TABLE 8
Exemplary PCR primers for sequencing Rosa26

| | Primer | |
|---|---|---|
| SEQ ID No. | Name | Sequence (from 5′ to 3′) |
| 163 | R26F008 | tctgattggctgctgaagtc |
| 164 | R26F013 | gtagccagcaagtcatgaaatc |
| 165 | R26R013 | gggagtattgctgaacctca |
| 166 | R26F014 | tcttgactaccactgcgattg |
| 167 | R26R014 | gttaggagccagtaatggagtt |
| 168 | R26F015 | agtgtctctgtctccagtatct |
| 169 | R26R015 | ttggtaaatagcaatcaactcagtg |
| 170 | R26F016 | tttctgctcaagtcacactga |
| 171 | R26R016 | caagcaatgacaacaacctgata |
| 172 | R26F017 | ttgctttctcctgatcccatag |
| 173 | R26R017 | cagtgctaatctagagcactacc |
| 174 | R26F018 | cattctcctgaagagctcagaat |
| 175 | R26R018 | tccattgggctttgtctatactt |
| 176 | R26F019 | gacaaaggaaattagcagagaacc |
| 177 | R26R019 | aactggtctttcccttggatatt |
| 178 | R26F020 | ctggctgcagcatcaatatc |
| 179 | R26R020 | gcctctattaattgcctttccc |
| 180 | R26F021 | ccattcacttcgcatccct |
| 181 | R26F005 | cgggaagtcgggagcata |
| 182 | R26R005 | gaggagaagcggccaatc |
| 183 | R26F006 | ctgctcttctcttgtcactgatt |
| 184 | R26R006 | gcgggagccactttcac |
| 185 | R26F008 | tctgattggctgctgaagtc |
| 186 | R26R008 | cgagagcaggtagagctagt |
| 187 | R26F010 | ggagtgccgcaataccttta |
| 188 | R26R010 | cctggactcatttcccatctc |
| 189 | R26F011 | gggtggagatgggaaatgag |
| 190 | R26F012 | gctacaccaccaaagtatagca |
| 191 | R26R012 | tggtggtggaacttatctgattt |
| 192 | R26F023 | agggggtacacattctcctga |
| 193 | R26R023 | gacctctgggttccattggg |
| 194 | R26F024 | caaagcccaatggaacccag |
| 195 | R26F025 | gaaggggctttcccaacagt |
| 196 | R26F026 | gcccaagacagggaaaacga |
| 197 | R26R026 | tgacaactctggtcgctctg |
| 198 | R26F028 | cagagagcctcggctaggta |
| 199 | R26R028 | aatggctccgtccgtattcc |
| 200 | R26F029 | gggaagtcgggagcatatcg |
| 201 | R26R029 | cactcccgaggctgtaactg |
| 202 | R26F030 | atggcgtgttttggttggag |
| 203 | R26R030 | ggagccactttcactgaccc |
| 204 | R26F031 | gggagggtcagtgaaagtgg |
| 205 | R26R031 | gagggccgtaccaaagacc |
| 206 | R26F032 | ggtcccaaatgagcgaaacc |
| 207 | R26R032 | gggtccgagagcaggtagag |
| 208 | R26F033 | ccgcctgaaggacgagacta |
| 209 | R26R033 | cagggcggtccttaggaaaa |
| 210 | R26F034 | gggagtgccgcaataccttt |
| 211 | R26R034 | gaaattgggctcgtcctcgt |
| 212 | R26F035 | cgaggacgagcccaatttct |
| 213 | R26R035 | agtgagggggcctaaggttt |
| 214 | R26F037 | actaccactgcgattggacc |
| 215 | R26R037 | aggagccagtaatggagttgt |
| 216 | R26F038 | cacaactccattactggctcct |
| 217 | R26R038 | ggagggtagcattccagagg |
| 218 | R26F021 | ccattcacttcgcatccct |
| 219 | R26R021 | ttgcagatgattgcttcctttc |
| 220 | R26F023 | agggggtacacattctcctga |
| 221 | R26R023 | gacctctgggttccattggg |
| 222 | R26F025 | gaaggggctttcccaacagt |
| 223 | R26R025 | gtggcgtatgccccagtatc |

[0535] Sequencing Analysis: SnapGene software was used to align the DNA sequences. After DNA sequence results were received from the University of Minnesota Biogenomics Center, they were uploaded into the SnapGene software and aligned by the software for analysis. Base pair substitutions, deletions, and insertions were determined by referencing to the chromatograms and confirmed by comparing sequences of DNA fragments amplified using different primers. When all of the edits and confirmations were done, the resulting new DNA parent sequence was made by replacing the original parent DNA sequence with the aligned one (SEQ ID NO: 224, map shown in FIG. 12). The Rosa26 sequence was different from the reference Rosa26 sequence. For example, there were base pair substitution, at positions 223, 420, 3927, 4029, and 4066, and base pair deletion between positions 2692 and 2693. Nucleotide substitutions and deletions make this sequence unique (FIG. 12). Thus the sequencing data provided more accurate sequence information for designing guide RNA targeting the Rosa26 locus.

[0536] Generating the Plasmid Expressing Guide RNA Targeting Rosa26

[0537] Oligonucleotides targeting Rosa26 was designed and synthesized by IDT. The sequences of the guide RNA are shown in Table 9. The px330 plasmid expressing guide RNA targeting Rosa26 was generated using methods described in Example 1. FIGS. 13A-13E show cloning strategies for cloning the plasmid targeting Rosa 26 (i.e., px330/ROSA exon 1). The constructed px330 plasmid was validated by sequencing using sequencing primers shown in Table 7.

TABLE 9
Exemplary oligonucleotides for making guide RNA constructs targeting Rosa26

| | SEQ ID | | SEQ ID | |
|---|---|---|---|---|
| Gene | No. | Forward sequence (5′ to 3′) | No. | Reverse sequence (5′ to 3′) |
| Rosa26 | 225 | acaccgccggggccgcctagagaagg | 226 | aaaaccttctctaggcggccccggcg |

### Example 3: Generating Plasmids that Simultaneously Express Two Guide RNAs

[0538] An alternative vector (e.g., px333) simultaneously expressing two guide RNAs will also be used for expressing guide RNA targeting two regions of a single gene. Targeting two regions of a single gene by CRISPR/Cas9 system will result in removal of the entire gene between the two cut sites when the DNA is repaired back together. Targeting two regions will increase the chance of producing a biallelic knockout, resulting in better sorts, more biallelic deletions, and overall a higher chance to produce pigs with a negative genotype, comparing to only targeting one locus in the gene.

[0539] The oligonucleotide pairs used in the px333 plasmid construction will contain higher G content, lower A content, and as many GGGG quadraplexes as possible, compared with the oligonucleotides used for the px330 plasmid. The GGTA1 targets will span nearly the entire GGTA1 gene, which will remove the entire gene from the genome. Furthermore, targeting multiple sites with this strategy will be used when inserting transgenes, which is another goal of ours further along in the project.

### Example 4: Isolating, Culturing and Transfecting Porcine Fetal Fibroblasts for Making Genetically Modified Pigs

[0540] To generate genetically modified pigs using a px330 plasmid expressing guide RNA targeting a gene, the px330 plasmid was transfected into porcine fetal fibroblasts. The transfected fibroblasts will express the guide RNA that causes disruption of one or more target genes. The resulting fibroblasts were used for making genetically modified pigs, e.g., by somatic cell nuclear transfer. This example shows isolation and culturing porcine fetal fibroblasts, and transfection of the fibroblasts with a px330 plasmid.

[0541] Cell Culture

[0542] Fetal fibroblasts cell lines used in the generation of genetically modified pigs included: Karoline Fetal (derived from female porcine ponor P1101, which provided a high islet yield after islet isolation), Marie Louise Fetal (derived from female porcine donor P1102, which provided a high islet yield after islet isolation), Slaughterhouse pig #41 (Male; showed a high number of islets in the native pancreas (as assessed by a very high dithizone (DTZ) score)), Slaughterhouse pig #53 (showed a high number of islets in the native pancreas as assessed by a high dithizone (DTZ) score).

[0543] Muscle and skin tissue samples taken from each of these pigs were dissected and cultured to grow out the fibroblast cells. The cells were then harvested and used for somatic cell nuclear transfer (SCNT) to produce clones. Multiple fetuses (up to 8) were harvested on day 30. Fetuses were separately dissected and plated on 150 mm dishes to grow out the fetal fibroblast cells. Throughout culture, fetus cell lines were kept separate and labeled with the fetus number on each tube or culture vessel. When confluent, cells were harvested and frozen at about 1 million cells/mL in FBS with 10% DMSO for liquid nitrogen cryo-storage.

[0544] Culture medium preparation: 5 mL Glutamax, 5 mL pen/strep, and 25 mL HI-FBS (for standard 5% FBS medium; use 10% FBS for sorted cells) were added to a 500 mL bottle of DMEM, high glucose, no glutamine, no phenol red. Centrifuge settings for spinning down all fetal fibroblasts were 5 minutes at 0.4 rcf (1600 rpm) at 4° C. Cells were thawed from liquid nitrogen storage by warming quickly to 37° C. in water bath. The thawed cells were quickly transferred to about 25 mL fresh, pre-warmed culture medium (enough to dilute the DMSO sufficiently). The cells were then spun down, the supernatant was removed and the cells were re-suspended in 1-5 mL fresh culture medium for counting or plating. Cells received a medium change every 3-4 days with pre-warmed medium, and were passaged when 90-100% confluent using TrypLE Express Dissociation Reagent.

[0545] Harvesting Adherent Fibroblasts: The medium was aspirated off the cells. DPBS was added to wash the cells. Pre-warmed (37° C.) TrypLE Express reagent was added to the cells. Minimum amount of the reagent was used to cover the cell layer thinly. The cells were incubated at 37° C. for 10 minutes. A volume of culture medium containing FBS was added to the TrypLE cell suspension to neutralize the enzyme. The cell suspension was pipetted up and down to dislodge all cells from the culture surface. The cell suspension was transferred to a 15 or 50 mL conical tube on ice. The plate/flask was checked under a microscope to ensure all cells were collected. Sometimes a medium wash helped collect cells that were left behind. The cells were spun down, and then re-suspended with fresh culture medium (between 1-5 mL for counting). If counting, a 1:5 dilution of the cells suspension was prepared by adding 20 μL cell suspension to 80 μL 0.2% Trypan Blue. The suspension was mixed well by pipetting up and down. 12-14 μL of the dilution was added to a hemocytometer to count the 4 corners. The numbers were averaged. For example, counting 20, 24, 22, 22 for each corner yielded an average of 22. This number was multiplied by the dilution factor 5, yielding 110×10⁴ cells/mL. The number was adjusted to 10⁶ by moving the decimal two places to the left, 1.10×10⁶ cells/mL. Finally, the numbers were multiplied by how many mL's the original sample was taken from to get the total number of cells.

[0546] Transfection of Fetal Fibroblasts

[0547] This experiment was to transfect fetal fibroblasts. The transfected fetal fibroblasts were used to generate genetically modified animal using the somatic cell nuclear transfer technique.

[0548] The GFP plasmid used (pSpCas9(BB)-2A-GFP) for transfection was an exact copy of the px330 plasmid, except that it contained a GFP expression region.

[0549] GFP transfected control cells: Transfections were done using the Neon Transfection System from Invitrogen. Kits came in 10 μL and 100 μL tip sizes. A day or two before the experiment, cells were plated in appropriate culture vessel depending on size of experiment and desired cell number and density. About 80% confluence was achieved on day of transfection.

[0550] On the day of the experiment, Neon module and pipette stand was set up in a biohood. A Neon tube was placed in the pipette stand and 3 mL of Buffer E (Neon Kit) was added to the Neon tube. The module was turned on and adjusted to desired settings (for fetal porcine fibroblasts: 1300 V, 30 ms, 1 pulse). Cells were harvested using TrypLE and counted to determine the experimental setup. Needed amount of cells were transferred to a new tube and remaining cells were re-plated. Cells were spun down after counting, and re-suspended in PBS to wash. The cells were spun down and re-suspended in Buffer R (Neon Kit) according to Table 10 for the number of cells and tip sizes.

TABLE 10
Exemplary Neon ® plate formats, volumes, and recommended kits

| | | DNA | siRNA | | | Vol. plating | | | Buffer R or | |
|---|---|---|---|---|---|---|---|---|---|---|
| Format | Cell Type | (μg) | (nM) | Neon ®Tip | | medium | | Cell no. | Buffer T | |
| 96-well | Adherent | 0.25-0.5 | 10-200 | 10 | μL | 100 | μL | 1-2 × 10⁴ | 10 | μL/well |
| | Suspension | 0.5-1 | | 10 | μL | | | 2-5 × 10⁴ | 10 | μL/well |
| 48-well | Adherent | 0.25-1 | 10-200 | 10 | μL | 250 | μL | 2.5-5 × 10⁴ | 10 | μL/well |
| | Suspension | 0.5-2 | | 10 | μL | | | 5-12.5 × 10⁴ | 10 | μL/well |
| 24-well | Adherent | 0.5-2 | 10-200 | 10 | μL | 500 | μL | 0.5-1 × 10⁵ | 10 | μL/well |
| | Suspension | 0.5-3 | | 10 | μL | | | 1-2.5 × 10⁵ | 10 | μL/well |
| 12-well | Adherent | 0.5-3 | 10-200 | 10 | μL | 1 | mL | 1-2 × 10⁵ | 10 | μL/well |
| | Suspension | 0.5-3 | | 10 | μL | | | 2-5 × 10⁵ | 10 | μL/well |
| 6-well | Adherent | 0.5-3 | 10-200 | 10 μL/100 μL | | 2 | mL | 2-4 × 10⁵ | 10 μL or | |
| | | (10 μL) | | | | | | | 100 μL/well | |
| | | 5-30 | | | | | | | | |
| | | (100 μL) | | | | | | | | |
| | Suspension | 0.5-3 | | 10 μL/100 μL | | | | 0.4-1 × 10⁶ | 10 μL or | |
| | | (10 μL) | | | | | | | 100 μL/well | |
| | | 5-30 | | | | | | | | |
| | | (100 μL) | | | | | | | | |
| 60 mm | Adherent | 5-30 | 10-200 | 100 | μL | 5 | mL | 0.5-1 × 10⁶ | 100 | μL/well |
| | Suspension | 5-30 | | 100 | μL | | | 1-2.5 × 10⁶ | 100 | μL/well |
| 10 cm | Adherent | 5-30 | 10-200 | 100 | μL | 10 | mL | 1-2 × 10⁶ | 100 | μL/well |

| | | | | | | |
|---|---|---|---|---|---|---|
| Suspension | 5-30 | 100 | μL | 2-5 × 10⁶ | 100 | μL/well |

[0551] Appropriate amount of DNA according to Table 10 was added to cell suspension and mixed by pipetting up and down. A Neon tip was applied from the kit to the Neon pipette to aspirate the volume of cell suspension into the Neon tip. The pipette was placed into the Neon tube in the pipette stand so that the Neon tip was submerged in the Buffer E. START was pressed on module interface until a “complete” message appeared. The pipette was removed from the pipette stand to eject the cell suspension into a volume of pre-warmed culture medium without antibiotics in a well of appropriate size according to Table 10.

[0552] The above steps were repeated until the entire cell suspension was used. Neon tips were changed every 2 transfections, and Neon tubes were changed every 10 transfections. The cells were incubated at 37° C. for 24 hours, and then the medium was changed with normal culture medium containing antibiotics. The resulting cells were cultured for about 5 days to allow for Cas9 cleavage, complete recycling of surface proteins after gene knockout, and proper cell division before sorting. The cells transfected with the GFP plasmid were shown in FIG. 15.

### Example 5: Fluorescence In Situ Hybridization (FISH) to the GGTA1 Gene

[0553] Gene disruption by CRISPR/cas9 was verified using FISH in a cell. This example shows exemplary methods for detecting GGTA1 gene using fluorescence in situ hybridization (FISH). The methods here were used to verify the presence or absence of a GGTA1 gene in a cell from an animal (e.g., an animal with GGTA1 knocked out).

[0554] Preparation of FISH Probes:

[0555] GGTA1 DNA was extracted from an RP-44 pig BAC clone (RP44-324B21) using an Invitrogen PureLink kit. The DNA was labeled by nick translation reaction (Nick Translation Kit—Abbott Molecular) using Orange—552 dUTP (Enzo Life Science). Sizes of the nick translated fragments were checked by electrophoresis on a 1% TBE gel. The labeled DNA was precipitated in COT-1 DNA, salmon sperm DNA, sodium acetate and 95% ethanol, then dried and re-suspended in 50% formamide hybridization buffer.

[0556] Hybridization of FISH Probes:

[0557] The probe/hybridization buffer mix and cytogenetic slides from pig fibroblasts (15AS27) were denatured. The probe was applied to the slides, and the slides were hybridized for 24 hours at 37° C. in a humidified chamber.

[0558] FISH Detection, Visualization and Image Capture:

[0559] After hybridization, the FISH slides were washed in a 2×SSC solution at 72° C. for 15 seconds, and counterstained with DAPI stain. Fluorescent signals were visualized on an Olympus BX61 microscope workstation (Applied Spectral Imaging, Vista, Calif.) with DAPI and FITC filter sets. FISH images were captured using an interferometer-based CCD cooled camera (ASI) and FISHView ASI software. The FISH image is shown in FIG. 16.

### Example 6: Phenotypic Selection of Cells with Cas9/Guide RNA-Mediated GGTA1 Knockout

[0560] Disruption of GGTA1 gene by the Cas9/guide RNA system were verified by labeling GGTA1 gene products. The GGTA1 knockout will be used as a marker for phenotypic sorting in knockout experiments. The GGTA1 gene encoded for a glycoprotein found on the surface of pig cells that if had been knocked out, would result in the glycoprotein being absent on the cell's surface. The lectin used to sort for GGTA1 negative cells was Isolectin GS-IB₄ Biotin-XX conjugate, which selectively bound terminal alpha-D-galactosyl residues, such as the glycoprotein produced by the GGTA1 gene.

[0561] Porcine fetal fibroblast cells were transfected with px330 plasmid expressing guide RNA targeting GGTA1 (generated in Example 1).

[0562] To select for negative cell after transfection, the cells were allowed to grow for about 5 days to recycle their surface proteins. The cells were then harvested, and labeled with the IB₄ lectin. The cells were then coated with DynaBeads Biotin-Binder, which were 2.8 micron supermagnetic beads that had a streptavidin tail that bound very tightly with the biotin-conjugated lectin on the surface of the cells. When placed in a magnet, the “positive” cells with lectin/beads bound on the surface stick to the sides of the tube, while the “negative” cells did not bind any beads and remained floating in suspension for an easy separation.

[0563] In detail, the cells were harvested from a plate using a TrypLE protocol and collected into a single tube. The cells were spun down, and re-suspended in 1 mL of sorting medium (DMEM, no supplements) to count. If less than 10 million cells, the cells were spun down and the supernatant was discarded. In a separate tube, IB₄ lectin (1 μg/μL) was diluted by 5 μL to 1 mL of sorting medium (final concentration 5 μg/mL). The cell pellet was re-suspended with the 1 mL of diluted lectin. The cell suspension was incubated on ice for about 15-20 minutes, with gentle sloshing every few minutes.

[0564] Biotin beads were prepared during incubation. A bottle of beads were vortexed for 30 seconds. 20 μL beads/1M cells were added to 5 mL of sorting medium in a 15 mL conical tube. The tube was vortexed, placed in DynaMag-15 magnet and let stand for 3 minutes. Medium were removed. 1 mL of fresh sorting medium was added and the tube was vortexed to wash the beads. The washed beads were placed on ice until use.

[0565] After cell incubation, cell suspension's volume was brought to 15 mL with sorting medium to dilute the lectin. The cells were spun and re-suspended with 1 mL of the washed biotin beads. The suspension was incubated on ice for 30 minutes in a shaking incubator at 125 rpm. The cell suspension was removed from shaking incubator and inspected. Small aggregates might be observed.

[0566] 5 mL of sorting medium was added to the cell suspension and the tube was placed in the DynaMag-15 for 3 minutes. The first fraction of “negatives” cells was collected and transferred to a new 15 mL conical tube. Another 5 mL sorting medium was added to wash the “positive” tube that was still on the magnet. The magnet was inverted several times to mix the cell suspension again. The tube was let stand for 3 minutes to separate cells. The second “negative” fraction was then removed and combined with the first fraction. 10 mL sorting medium was added to the “positive” tube. The tube was removed from the magnet, and placed in an ice bath until ready to use.

[0567] The tube of “negative” fractions was placed onto the magnet to provide a secondary separation and remove any bead-bound cells that might have crossed over from the first tube. The tube was kept on the magnet for 3 minutes. The cells were pipetted away from the magnet and transferred into a new 15 mL conical tube. The original “positive” tube and the double sorted “negative” tube were balanced and cells in them were spun down. The pellet of the “positives” appeared a dark, rusty red. The “negative” pellet was not visible, or appeared white.

[0568] Each pellet was re-suspended in 1 mL of fresh culture medium (10% FBS) and plated into separate wells on a 24-well plate. The wells were inspected under a microscope and diluted to more wells if necessary. The cells were cultured at 37° C. The genetically modified cells, i.e., unlabeled cells were negatively selected by the magnet (FIG. 17A). The non-genetically modified cells, i.e., the labeled cells had accumulated ferrous beads on the cell surface (FIG. 17B).

### Example 7. Generation and Characterization of GGTA1/NLRC5 Knockout Pigs

[0569] This example shows exemplary methods for generating knockout pigs. A knockout pig can have reduced protein expression of two or more of the following: NLRC5, TAP1, C3, CXCL10, MICA, MICB, CIITA, CMAH, GGTA1 and/or B4GALNT2. One of such knockout pig was a GGTA1/CMAH/NLRC5 knockout pig using CRISPR/cas9 system. The pigs provided islets for transplantation. Porcine islets with disrupted GGTA1/CMAH/NLRC5 had MHC class I deficiency and will induce low or no immuno-rejection when transplanted to a recipient.

[0570] Transfection of Fetal Fibroblasts

[0571] The px330 plasmids expressing guide RNA targeting GGTA1, CMAH, and NLRC5 generated in Example 1 were transected in porcine fetal fibroblasts. Pig fetal fibroblasts were cultured in DMEM containing 5-10% serum, glutamine and penicillin/streptomycin. The fibroblasts were co-transfected with two or three plasmids expressing Cas9 and sgRNA targeting the GGTA1, CMAH or NLRC5 genes using Lipofectamine 3000 system (Life Technologies, Grand Island, N.Y.) according to the manufacturer's instructions.

[0572] Counter-Selection of GGTA1 KO Cells

[0573] Four days after transfection, the transfected cells were harvested and labeled with isolectin B4 (IB4)-biotin. Cells expressing αGal were labeled with biotin conjugated IB4 and depleted by streptavidin coated Dynabeads (Life Technologies) in a magnetic field (FIG. 91). The αGal deficient cells were selected from the supernatant. The cells were examined by microscopy. The cells containing no or very few bound beads after sorting were identified as negative cells.

[0574] DNA Sequencing Analysis of the CRISPR/Cas9 Targeted GGTA1 and NLRC5 Genes

[0575] Genomic DNA from the IB4 counter-selected cells and cloned pig fetuses were extracted using Qiagen DNeasy Miniprep Kit. PCR was performed with GGTA1 and NLRC5 specific primer pairs as shown in Table 11. DNA polymerase, dNTPack (New England Biolabs) was used and PCR conditions for GGTA1 were based on annealing and melting temperature ideal for those primers. The PCR products were separated on 1% agarose gel, purified by Qiagen Gel Extraction Kit and sequenced by the Sanger method (DNA Sequencing Core Facility, University of Minnesota) with the specific sequencing primers as shown in Table 7.

TABLE 11
Exemplary PCR primers for amplifying genomic DNA from genetically modified
cells and animals

| | SEQ ID | Forward sequence (5′ to | SEQ | |
|---|---|---|---|---|
| Gene | No. | 3′) | ID No. | Reverse sequence (5′ to 3′) |
| GGTA1 | 227 | cttcgtgaaaccgctgtttatt | 228 | gactggaggactttgtatat |
| CMAH | 229 | tgagttccttacgtggaatgtg | 230 | tcttcaggagatctgggttct |
| NLRC5 | 231 | ctgctctgcaaacactcaga | 232 | tcagcagcagtacctcca |

[0576] Somatic Cell Nuclear Transfer (SCNT)

[0577] SCNT was performed as described by Whitworth et al. Biology of Reproduction 91(3):78, 1-13, (2014). The SCNT was performed using in vitro matured oocytes (DeSoto Biosciences Inc., St. Seymour, Tenn.). Cumulus cells were removed from the oocytes by pipetting in 0.1% hyaluronidase. Only oocytes with normal morphology and a visible polar body were selected for SCNT. Oocytes were incubated in manipulation media (Ca-free NCSU-23 with 5% FBS) containing 5 μg/mL bisbenzimide and 7.5 μg/mL cytochalasin B for 15 min. Oocytes were enucleated by removing the first polar body plus metaphase II plate. A single cell was injected into each enucleated oocyte, fused, and activated simultaneously by two DC pulses of 180 V for 50 μsec (BTX cell electroporator, Harvard Apparatus, Hollison, Mass., USA) in 280 mM Mannitol, 0.1 mM CaCl₂, and 0.05 mM MgCl₂. Activated embryos were placed back in NCSU-23 medium with 0.4% bovine serum albumin (BSA) and cultured at 38.5° C., 5% CO₂ in a humidified atmosphere for less than 1 hour, and transferred into the surrogate pigs.

[0578] Producing Genetically Modified Pigs Using Embryos

[0579] Embryos for transferring to the surrogate pigs were added to a petri dish filled with embryo transferring media. A 0.25 ml sterile straw for cell cryopreservation was also used. Aspiration of embryos was performed at 25-35° C.

[0580] Aspiration of embryos was performed following this order: media layer-air layer-media layer-air layer-embryo layer-air layer-media layer-air layer-media layer. When the straw sterilized with EO gas was used, its interior was washed by repeating aspiration and dispensing of the medium for embryo transplantation 1-3 times, before aspiration of embryos. After the aspiration, the top end of straw was sealed by a plastic cap. To keep the aspirated and sealed straw sterile, a plastic pipette (Falcon, 2 ml) was cut in a slightly larger size than the straw, put therein, and sealed with a paraffin film. The temperature of the sealed straw was maintained using a portable incubator, until shortly before use.

[0581] Embryos and estrus-synchronized surrogate mothers were prepared. Transferring of embryos will be performed by exposing ovary through laparotomy of the surrogate mothers. After anesthetization, the mid-line of the abdominal region was incised to expose the uterus, ovary, oviduct, and fimbriae. The straw aspirating embryos were aseptically taken from the portable incubator, and inserted into the inlet of oviduct. The inserted straw was moved up to the ampullary-isthmic junction region. After the insertion procedure, the straw was cut at the air containing layer on the opposite using scissors. A 1 cc syringe was mounted on the cut end, and approximately 0.3 cc of air was injected to release the embryos and medium from the straw into the oviduct. At this time, 5 mm of the top end of a 0.2 ml yellow tip was cut off and used to connect the syringe and straw.

[0582] After the embryo transfer, the exposed uterus, ovary, oviduct, and fimbriae were put in the abdominal cavity, and the abdominal fascia was closed using an absorbable suture material. Then, the surgical site was cleaned with Betadine, and treated with antibiotics and anti-inflammatory and analgesic drugs. A pregnancy test of the surrogate mother transplanted with embryos was performed, followed by induction of delivery of non-human animals that successfully got pregnant.

[0583] Pregnancy and Fetuses

[0584] Two litters of pig fetuses (7 from pregnancy 1 and 5 from pregnancy 2) were obtained. Fetuses were harvested at day 45 (pregnancy 1) or 43 (pregnancy 2) and processed for DNA and culture cell isolation. Tissue fragments and cells were plated in culture media for 2 days to allow fetal cells to adhere and grow. Wild type cells (fetal cells not genetically modified) and fetal cells from pregnancy 1 or 2 were removed from culture plates and labeled with IB4 lectin conjugated to alexa fluor 488 or anti-porcine MHC class I antibody conjugated to FITC. Flow cytometric analysis was performed and data shown in FIG. 21A-C: Pregnancy 1 or FIG. 21D-E: Pregnancy 2. The histogram for the WT cells is included in each panel to highlight the decrease in overall intensity of each group of fetal cells. Of specific interested is the decrease in alpha Gal and MHC class I labeling in pregnancy 1 indicated as a decrease in peak intensity. In pregnancy 2, fetus 1 and 3 have a large decrease in alpha gal labeling and significant reduction in MHC class 1 labeling as compared to WT fetal cells.

[0585] Genotypes of the Fetuses

[0586] DNA from fetal cells was subjected to PCR amplification of the GGTA1 (compared to Sus scrofa breed mixed chromosome 1, Sscrofa10.2 NCBI Reference Sequence: NC_010443.4) or NLRC5 (consensus sequence) target regions and the resulting amplicons were separated on 1% agarose gels (FIGS. 18A, 18B, 19A, and 19B). Amplicons were also analyzed by sanger sequencing using the forward primer alone from each reaction. The results are shown as Pregnancy 1 fetuses 1, 2, 4, 5, 6, and 7 truncated 6 nucleotides after the target site for GGTA1. Fetus 3 was truncated 17 nucleotides after the cut site followed by a 2,511 (668-3179) nucleotide deletion followed by a single base substitution. Truncation, deletion and substitution from a single sequencing experiment containing the alleles from both copies of the target gene can only suggest a gene modification has occurred but not reveal the exact sequence for each allele. From this analysis it appears that all 7 fetuses contained a single allele modification. Sequence analysis of the NLRC5 target site for fetuses from pregnancy 1 was unable to show consistent alignment suggesting an unknown complication in the sequencing reaction or varying DNA modifications between NLRC5 alleles that complicate the sanger sequencing reaction and analysis. Pregnancy 2 fetal DNA samples 1, 3, 4, and 5 were truncated 3 nucleotides from the GGTA1 gene target site. Fetus 2 had variability in sanger sequencing that suggests a complex variability in DNA mutations or poor sample quality. However, fetal DNA template quality was sufficient for the generation of the GGTA1 gene screening experiment described above. NLRC5 gene amplicons were all truncated 120 nucleotides downstream of the NLRC5 gene cut site.

[0587] Fetal DNA (from wild type (WT) controls, and fetuses 1-7 from pregnancy 1) was isolated from hind limb biopsies and the target genes NLRC5 and GGTA were amplified by PCR. PCR products were separated on 1% agarose gels and visualized by fluorescent DNA stain. The amplicon bands in the WT lane represent unmodified DNA sequence. An increase or decrease in size of an amplicon suggested an insertion or deletion within the amplicon, respectively. Variations in the DNA modification between alleles in one sample might make the band appear more diffuse. Minor variations in the DNA modification were possible to resolve by a 1% agarose gel. The results are shown in FIGS. 20A-20B. A lack of band as in the NLRC5 gel (fetuses 1, 3, and 4 of Pregnancy 1; FIG. 20A bottom) suggested that the modification to the target regions was disrupted the binding of DNA amplification primers. The presence of all bands in GGTA1 targeting experiment suggests that DNA quality was sufficient to generate DNA amplicons in the NLRC5 targeting PCR reactions. Fetuses 1, 2, 4, and 5 of Pregnancy 1 (FIG. 20A, top) had larger GGTA1 amplicons, suggesting an insertion within the targeted area. For fetus 3 of Pregnancy 1 (FIG. 20A, top), the GGTA1 amplicon migrated faster than the WT control, suggesting a deletion within the targeted area. For fetuses 6 and 7 of Pregnancy 1 (FIG. 20A, bottom), the NLRC5 amplicons migrated faster than the WT, suggesting a deletion with in the target area. Fetuses 1-5 of Pregnancy 2, (FIG. 20B, top) GGTA1 amplicons were difficult to interpret by size and were diffuse as compared to the WT control. Fetuses 1-5 (FIG. 20B, bottom) NLRC5 amplicons were uniform in size and density as compared to the wild type control.

[0588] Given the variation in phenotypic results for the alpha Gal and MHC class 1 flow cytometric labeling there is considerable variation in the bi-allelic mutations in the GGTA1 and NLRC5 genes. This observation is supported by differences in band size in the agarose gels, truncated gene products, and sequencing challenges (FIGS. 18A-18B, 19A-19B, 20A-20B, and 21A-21E). Cloning of individual alleles will be performed to fully decipher the sequence modifications. However, the phenotypic, DNA sequencing, and functional analysis of fetuses support the creation of biallelic GGTA1 and NLRC5 gene modifications in fetal pigs.

[0589] Impact of Gene Knockout on Proliferation of Human Immune Cells

[0590] Next, with cells from fetus 3 of pregnancy 1, co-culture assays were performed to evaluate the impact of decreased MHC class I expression on proliferation of human immune cells.

[0591] Mixed Lymphocyte Reaction (MLR)

[0592] Co-cultures were carried out in flat-bottom, 96-well plates. Human PBMCs labeled with Carboxyfluorescein succinimidyl ester (CFSE) (2.5 μM/ml), were used as responders at 0.3-0.9×10⁵ cells/well. Wild type or Porcine fibroblasts at 0.1-0.3×10⁵ cells/well (from wild type pigs or the GGTA1/NLRC5 knockout fetuses) were used as stimulators at stimulator-responder ratios of 1:1, 1:5 and 1:10. MLR co-cultures were carried out for 4 days in all MLR assays. In another parallel experiment, total PBMCs cells were stimulated with phytohaemagglutinin (PHA) (2 ug/ml) as positive control.

[0593] Cultured cells were washed and stained with anti-CD3 antibody, anti-CD4 antibody and anti-CD8 antibody followed by formaldehyde fixation and washed. BD FACS Canto II flow cytometer was used to assess the proliferative capacity of CD8+ and CD4+ T cells in response to fibroblasts from the GGTA1/NLRC5 knockout fetus compared to unmodified porcine fibroblast cells. Data were analyzed using FACS diva/Flow Jo software (Tri star, San Diego, Calif., USA), and percentage CFSE dim/low was determined on pre gated CD8 T cells and CD4 T cells.

[0594] The proliferative response of human CD8+ cells and CD4+ T cells to wild type and GGTA1/NLRC5 knockout fetal cells are shown in FIGS. 22A-22C. Cells were gated as CD4+ or CD8+ before assessment of proliferation (FIG. 22A). CD8 T cell proliferation was reduced following treatments stimulation by fetal cells with GGTA1/NLRC5 knockout fibroblasts compared to wild type fetal cells. Almost 55% reduction in CD8+ T cells proliferation was observed when the human responders were treated with GGTA1/NLRC5 knockout fetal cells at 1:1 ratio (FIG. 22B). Wild type fetal cells elicited 17.2% proliferation in human CD8+ T cells whereas the GGTA1/NLRC5 knockout fetal cells from fetus 3 (pregnancy 1) induced only 7.6% proliferation (FIG. 22B). No differences were observed in CD8+ T cells proliferative response at 1:5 and 1:10 ratio compared to the wild type fetal cells (FIG. 22B). No changes were observed in CD4+ T cell proliferation in response to GGTA1/NLRC5 knockout compared to the wild type fetal cells (FIG. 22C).

[0595] Delivery of Live Piglets

[0596] One of the pregnancies obtained above was allowed to complete gestation. 7 live piglets were delivered by C-section at full term (FIG. 23). Ear clippings and tail skin samples were taken and analyzed for screening mutations at or near the GGTA1 and NLRC5 genes. The genotypes of the piglets were determined by PCR. Three PCR experiments using different primer pairs were performed to confirm the genotype of the piglets.

[0597] First PCR experiment: PCR was run using samples from piglets #6 and #7. The NLR amplification for piglet #6 produced one strong band, while #7 produced an array of bands when run on a gel (FIG. 24A). The strongest bands were gel extracted from each piglet and yielded sufficient DNA for sequencing. The PCR product of piglet #6 showed robust band at predicted PCR product. The PCR product of piglet #7 showed a band at size different from the predicted PCR product. The results indicated that piglet #6 was a mono-allelic mutant while piglet #7 was a bi-allelic mutant at the NLRC5 gene site. Primer set used for GGTA1 genotyping were: Gal amp 1 forward: gagcagagctcactagaacttg (SEQ ID NO: 153), and Gal amp1 reverse: AAGAGACAAGCCTCAGACTAAAC (SEQ ID NO: 154) (644 bp amplicon). Primer set used for NLRC5 genotyping were: NL1_First_screen Forward: ctgctctgcaaacactcaga (SEQ ID NO: 155), and NLRC5-678 Reverse: gtggtcttgcccatgcc (SEQ ID NO: 156 (630 bp amplicon).

[0598] Second PCR experiment: PCR was run using samples from piglets #5, #6, and #7. Only NLRC5 gene was tested. The same PCR amplification as in the first PCR experiment was performed. The PCR product of piglets #5 and #6 showed a band at the expected size (FIG. 24B). The PCR product of piglet #5 showed a second faint band (FIG. 24B). The PCR product of piglet #7 showed an array of bands as in the first PCR experiment above. These results indicated that the NLRC5 gene had in piglets #5, #6, and #7 mono-allelic and bi-allelic mutations in these piglets.

[0599] Third PCR experiment: PCR was run using samples from piglets #1, #2, #4, #5, #6, and #7. Primer set used for GGTA1 genotyping were SEQ ID NOs. 193 and 194 in Table 11 (303 bp amplicon). Primer set used for NLRC5 genotyping were SEQ ID NOs. 197 and 198 in Table 11 (217 bp amplicon). The NLRC5 gene amplification for piglets #1 and #2 was not as robust as the rest and produced a fainter band (FIG. 24C). Piglet #5 produced a more smeared band than the rest as well (FIG. 24C). The GGTA1 screen produced consistent bands. The NLRC5 gene amplification product is smaller and different in this experiment and created a product that varied in piglets #1 and #2, #4 and #5, #6 and #7, indicating that different mutations were present that lead to the loss of MHC class 1 expression.

[0600] Genotyping the Piglets by Sequencing

[0601] The genotypes of the piglets were determined by sequencing. As shown in FIGS. 25A-25F, Piglets #1, #2, #4, #5, #6, and #7 had one or more mutations on the NLRC5 gene.

### Example 8. Generation and Characterization of GGTA1/NLRC5 Knockout/HLA-G1 Knockin Cells for Making Genetically Modified Pig

[0602] One strategy to enhance porcine xenografts survival when transplanted to a recipient (e.g., a primate such as human) is to simultaneously suppress the level of Gal α-(1,3)Gal antigen (Gal antigen) and SLA1, and in the meantime, to suppress the graft-activated natural killer cell (NK cells) proliferation in absence of SLA1. To this end, cells with GGTA1 knocked out (to suppress Gal antigen), NLRC5 knocked out (to suppress SLA1), and HLA-G1 knocked in (to suppress NK cell proliferation) were generated using CRISPR-Cas9-mediated gene editing technology.

[0603] To get the optimal expression of HLA-G1, HLA-G1 cDNA was integrated within the first exon of pig Rosa26. The accurate sequence of exon1 of Rosa26 was determined as described in Example 2 above. We first confirmed the 1000 bp DNA sequence to 5′ and 3′ sequence of the cut site on Rosa26. 1000 bp upstream of the cut site was designed as left homologous arm and 1000 bp downstream was designated as right homologous arm. The sequence of left homologous arm was adapted by Li et al., (Li P. et al., Identification and cloning of the porcine Rosa26 promoter and its role in transgenesis. Transplantation Technology 2014, doi: 10.7243/2053-6623-2-1) (FIG. 26A), which was later on confirmed by amplifying it using sequence specific primers. The primers for right homologous arm (including exon 1 and the cut site) were designed and amplified 1000 bp product based on the sequence available in database using Long Amp (NEB). Following were the primers for the amplification of left and right homologous arms: Left Rosa26 Forward: gcagccatctgagataggaaccctgaaaacgagagg (SEQ ID NO: 157), Left Rosa26 Reverse: acagcctcttctctaggcggcccc (SEQ ID NO: 158); Right Rosa26 Forward: cgcctagagaagaggctgtg (SEQ ID NO: 263) and Right Rosa26 Reverse: actcccataaaggtattg (SEQ ID NO: 264).

[0604] The sequences of the arms were validated by performing next generation sequencing. Amplicon of Rosa26 gene from pig obtained after long range PCR (Qiagen, USA) as per manufacturer's instructions. The amplified product was run of 0.8% of agarose gel (FIG. 26B, Lanes: Marker: 1 kb DNA ladder; 1 and 2 Rosa26 amplicons run in duplicates). The amplified fragments were eluted from gel using Gel extraction kit (Invitrogen, USA) following the manufacturer's instructions. The eluted fragment was quantitated by nano-drop and subjected to Next Gen Sequencing. The consensus sequence of amplicon based on paired read analysis is shown in FIG. 26C. Homology directed recombination constructs for inserting HLA-G1 at Rosa26 locus are shown in FIGS. 26D, 26E, and 26F; and FIGS. 117-119.

[0605] Generation of Homology Directing Fragments Containing HLAG1 for Rosa26 Locus

[0606] Inserting HLA-G1 at the Rosa26 locus was performed using Gibson Assembly technology, which allowed for successful assembly of multiple DNA fragments, regardless of fragment length or end compatibility, in a single-tube isothermal reaction. The Gibson Assembly Master Mix included three different enzymatic activities that were adopted to perform in a single reaction buffer: the exonuclease created single-stranded 3′ overhangs that facilitated the annealing of fragments that shared complementarity at one end (overlap region); the DNA polymerase filled in gaps within each annealed fragment; and the DNA ligase sealed nicks in the assembled DNA.

[0607] PCR was performed for generating homologous left and right arms (having appropriate base overlap with the HLA-G1 sequence). Chemical synthesized gBLOCK for HLA-G1 was re-suspended in nuclease free water at the concentration 10 ng/mL. Since HLA-G1 was large enough to add on 50 bp as an overlapping mark further, we used left and right arms to add an extra 50 bp overlapping to HL-G1. We added the 50 bp overlap in the reverse primer of fragment 1 (Left arm for homology-directed repair (HDR)) and forward primer of fragment 2 (Right arm of HDR). So, left and right arm were 1050 bp in length.

[0608] The reaction for the left arm fragment was set up as follows: 2 μL of DNA (concentration 298 ng/ml), 1 μL of Forward Primer (GLF)(10 μM), 1 μL of Reverse Primer (GLR)(10 μM), and 21 μl of Nuclease Free Water (NFW) were mixed. The mixture was added to High Yield PCR EcoDry Premix (obtained from Clontech). PCR was performed. The predicted amplicon size was 1050 bp. The Tm was 61.5° C. The PCR product resulted multiple bands on an agarose gel. The 1050 bp band was eluted from the agarose gel for assembly and for better representation of the image.

[0609] The reaction for the right arm fragment was set up as follows: 10 μL of 10× Long Range Buffer, 1 μL of dNTP, 2 μL of DNA (concentration 298 ng/ml), 1 μL of Forward Primer (10 uM), 1 μL of Reverse Primer (10 μM), 2 μL of Long Range Amp were mixed with nuclease free water to make up a total volume of 50 μL. The Tm was 67° C. The expected amplicon size was 987 bp.

[0610] The reaction for the middle fragment (HLA-G1) was set up as follows: 10 μL of 10× Buffer, 1 μL of dNTPs, 1 μL or 2 μL of gBlock concentration), 1 μL of Forward Primer (10 uM), 1 μL of Reverse Primer (10 uM), 2 μL of Long Range Amp were mixed with nuclease free water to make a total volume of 50 μL. The Tm was 67° C.

[0611] Purification of left, right and middle arms from the agarose gel was done as per instructions of PureLink® Quick Gel Extraction Kit (Invitrogen). The concentrations of all fragments were measured using nano-drop spectrophotomter. 23.5 ng/μL, 30 ng/μL and 28.3 ng/μL were the concentrations of left, middle and right fragments eluted from 1.2% agarose gel. Following the instructions for the Gibson assembly, 2 μL of each fragment was mixed with 10 μL of GA master mix (NEB) and 4 μL of nuclease free water to make the final volume 20 μL in a 0.2 ml of PCR tube and incubated in a thermal cycler at 50° C. for an hour.

[0612] Then 2 μL of assembled product was subjected to Long range PCR using Long Amp (NEB) using forward primers of left arms and reverse primers of right arm. The reaction of the Long range PCR was set up as follows: 10 μL of 5× Long Range Buffer, 1 μL of dNTPs (100 μM; NEB), 2 μL of Amplified gblock HLA-G1, 1 μL of Forward Primer (10 μM), 1 μL of reverse Primer (10 μM), were mixed with nuclease free water to a final volume of 50 μL. The PCR was performed and the expected amplicon size was about 3000 bp.

[0613] Designing and Cloning of gRNA to Targeting the Exon 1 of Pig Rosa26 Exon 1, GGTA1 and NLRC5 (for SLA1 Knock Out)

[0614] Specific oligonucleotides for making gRNAs that make cut in exon 1 of pig ROSA26 exon 1, in close proximity of first codon of GGTA1, or NLRC5 were designed using http://zifit.partners.org/ZiFiT/CSquare9Nuclease.aspx. The cDNA sequence of HLA-G1 is shown in Table 2, and the genomic sequence of HLA-G is shown as SEQ ID: No. 191. The maps of the genomic sequence and cDNA of HLA-G are shown in FIGS. 14A-14B.

[0615] Briefly, the oligonucleotides were synthesized and resuspended in respective amount of nuclease free water to get the concentration of 100 μM each. 1 μL of each oligonucleotides (forward and reverse) were mixed with 1 μL of 10×T4 Polynucleotide Kinase Reaction Buffer, 0.5 μL T4 Polynucleotide Kinase and 6.5 μL of dH₂O to make up the total volume 10 μL in 0.2 μL tubes. The tubes with the reaction solution were placed in a thermocycler. The following program was run for the appropriate annealing of the forward and reverse oligos: 37° C. for 30 min; 95° C. for 5 min; Ramp down to 25° C. at 0.1° C./sec. The annealed oligos were diluted by 1:100.

[0616] Plasmid pX330-U6-Chimeric BB-CBh-hSpCas9 (Addgene) was used to clone the annealed oligonucleotides to generate gRNA for the CRISPR-associated Cas9 nuclease system. One microgram of plasmid pX330 was digested with Bbsl (New England Biolabs, Ipswich, Mass.) for 15 min at 37° C. using fast digest buffer and then kept for 15 min to inactivate Bbsl. Then 0.2 μL of Calf-intestinal alkaline phosphatase (CIP) was added and incubated for 1 hour, to avoid the self-ligation of the digested vector. Digested pX330 was purified using Plasmid Extraction mini-prep kit (Qiagen). Digested vector was mixed with 300 μL of PB buffer and then added to purification column of this kit, which was then spun down at 8000 rpm×1 min. The flow-through was discarded and the column was washed by PE buffer (containing absolute ethanol) and finally eluted in 50 μL of EB buffer. 1.34 (50 ng) of digested px330 vector was mixed with 1.0 μL diluted oligonucleotides, 5 μL 10×T4 Ligase Buffer, and 2.5 μL T4 DNA Ligase, and the finally the volume was made to 50 μL by adding 39.9 μL of nuclease free water. Negative control was run without adding any oligo to the reaction mix. Ligase was then inactivated at 65° C. for 5 min before heading to transformation in TOP10 competent cells (Invitrogen), following the manufacturer's protocol. The DNA clones were sequence.

[0617] Evidence of ligation of Rosa26 oligos in px330 vector juxtaposed with gRNA was shown in FIGS. 27A, 27B, and 27C. The sequence of the correct clone was shown in FIG. 27A and the RNC1 E02_008 sequencing result of constructed plasmid was shown in FIG. 27B.

[0618] Restriction digestion of ligated products was also performed to verify the success of ligation. Two restriction enzymes (Bsbl and Agel) were used to digest the purified the ligated products. Since oligonucleotides were ligated in Bsbl sites, the Bsbl site was disrupted in px300 vectors that harboring oligonucleotides (FIG. 27C, Lane 1: intact vector; Lane 2: ligated vector with disrupted Bsbl site).

[0619] In vitro transcription (IVT) and in vitro Cas9-mediated cleavage of target DNA

[0620] To examine the cleavage potentials of gRNAs designed for Rosa26, GGTA1 and NLRC5 sites, Guide-it™ sgRNA In Vitro Transcription and Screening System was used for the in vitro transcription of guide RNAs following manufacturer's protocol. The respective cleavage potential of the guided RNAs was also examined. The gRNA for GGTA1 cleavage was performed using the GalMet oligos (Forward: acaccggagaaaataatgaatgtcaag (SEQ ID NO: 367); Reverse: aaaacttgacattcattallllctccg (SEQ ID NO: 368)) (FIG. 28). Gal(Met) targeted the first methionine of the GGTA1 cDNA transcript, but not any other regulatory methyl group outside in the promoter region.

[0621] A: Amplification of Target (about 2000 kb) for gRNAs.

[0622] About 2 kb long amplicon containing target sequence for gRNA for Rosa26, GGTA1 and NLRC5 were amplified using specific primers as per instructions of the kit. Pig DNA and primers were mixed with nuclease free water to a total volume of 25 μL. The mixture was later mixed with Dry PCR mix. The Tm of reactions for Rosa26, GGTA1 and NLRC5 were 61.5° C., 60° C., and 63° C., respectively. All the amplicons from agarose gel was eluted using of Purlink; Quick Gel Extraction kit (Invitrogen).

[0623] B: In-Vitro Transcription

[0624] Chemically synthesized DNA template that contained designed sgRNAs encoding sequence under the control of a T7 promoter and universal gRNA sequence were obtained from IDT. The template was amplified by PCR with the d Guide-it Scaffold Template provided in the kit.

[0625] The IVT templates for Rosa26, NLRC5 and GGTA1 were as follows:

Rosa26:
(SEQ ID NO: 233)
gccgcctctaatacgactcactatagggccgccggggccgcctagagagt
tttagagctagaaatagca;
NLRC5:
(SEQ ID NO: 234)
gccgcctctaatacgactcactatagggccggcctcagaccccacacaga
ggttttagagctagaaatagca;
GGTA1:
(SEQ ID NO: 235)
gcggcctctaatacgactcactataggggagaaaataatgaatgtcaagt
tttagagctagaaatagca.

[0626] The 5 μl of Guide-it Scaffold Template (provided in kit) with 1 μl of the abovementioned templates were mixed at a concentration of 10 μM, and dilute with RNase-free water to a final volume of 25 μl. The solutions were mixed by gentle pipetting. The entire 25 μl mixture was added to one tube of High Yield PCR EcoDry Premix. Thermal cycling using the following program: 95° C. for 1 min; 33 cycles of 95° C. for 30 sec, 68° C. for 1 min, 68° C. for 1 min.

[0627] The resulting PCR products were run on a 1.8% agarose gel. A single band at about 140 bp was obtained for each of the three IVT templates. The bands were then purified by NucleoSpin Gel provided by the kit.

[0628] In vitro transcription was then performed by mixing 100 ng of the PCR products with Guide-it In Vitro Transcription Buffer and Guide-it T7 Polymerase Mix. The final volume was 20 μL by adding nuclease free water and incubated at 42° C. for 1 hour.

[0629] C: Purification and Quantification of In Vitro transcribed sgRNA

[0630] (1) 2 μl of RNase free DNase I was added to the entire 20 μl of the in vitro transcription reaction and incubate at 37° C. for 0.5 hour.

[0631] (2) RNase free water was added to the reaction mixture to a final volume of 100 μl.

[0632] (3) 100 μl of phenol:chloroform:isoamyl alcohol (25:24:1), saturated with 10 mM Tris, pH 8.0, 1 mM EDTA was added to the diluted reaction mixture from Step (2) and vortex well.

[0633] (4) The solution was centrifuged at 12,000 rpm for 2 min at room temperature. The supernatant was transferred to a new tube, to which an equal volume of chloroform was added.

[0634] (5) The solution was vortexed well and then centrifuged at 12,000 rpm for 2 min at room temperature.

[0635] (6) The supernatant was transferred to a new tube, added 1/10 volume of 3M sodium acetate and an equal volume of isopropanol, and vortexed well.

[0636] (7) The solution from Step (6) was incubated for 5 min at room temperature, and then centrifuged at 15,000 rpm for 5 min at room temperature.

[0637] (8) The supernatant was removed carefully. The pellet was rinsed with 80% ethanol and centrifuged at 15,000 rpm for 5 min at room temperature.

[0638] (9) The pellet was air dried for about 15 min and resuspended in 20 μl of RNase free water and the concentration was checked using nano-drop.

[0639] D: Cas9 mediated cleavage of 2 kb template (section A) with purified gRNAs of Rosa26, NLRC5 and GGTA1

[0640] (1) Cleavage reactions containing above sgRNA (specific for a target) and the amplified experimental templates (about 2 kb long of each gene; Rosa26, NLRC5 (NL1) and GGTA1, containing target sequence) were set up.

[0641] (2) The experimental cleavage template (100 ng total) with experimental sgRNA sample (20 ng total from above), 1 μL of Guide-it Recombinant Cas9 Nuclease, 1 μL of 10× Cas9 Reaction Buffer, 1 μL of 10×BSA were mixed and made up to a final volume of 10 μL with nuclease free water. The mixture was incubated at 37° C. for 1 hour. The reaction was stopped by incubating solution at 70° C. for 10 min. The entire 10 μl of reactions was analyzed on a 1% agarose gel alongside a negative control (100 ng of an uncleaved 2 kb control fragment) (FIG. 29).

[0642] Electroporation and Flow Sorting

[0643] Cryopreserved cells were seeded 1×10⁶ cells per petri dish in 10% complete DEMEM media. After that the cells were seeded, the media was changed after each 24 h and allowed the petri dish to be confluent (>70%). Then the cells were harvested using PBS, TRYPLE Express and then resuspended in 100 μL of R buffer provided by Neon system for electroporation. 1.5 μg of px330 plasmids containing gRNAs (for Rosa26, GGTA1 or NLRC5) was added in the 1.5 ml tube and mixed by gentle tapping. Afterwards electroporation was performed in a 100 μL tube at 1300 V×30 ms×1 pulse. Cells were seeded in 15% complete DMEM media and monitored after each 12 h. After 12 h post electroporation, the signs of cells adherence were visible.

[0644] Pig fetus fibroblasts were electroporated with px330U6-gRNA (met, GGTA1); px330U6-gRNA (Rosa26) and px330U6-gRNA (NLRC5); and amplicon of Gibson assembled HLA-G1 with Rosa26 homologous left and arms (designed for the insertion at the pig Rosa26 locus) were harvested at 5th day after the transfection using 1×PBS −/− and Triple Express.

[0645] We transfected in three different tubes of and recovered about 1×10⁶ cells from each petri dish. These cells were stained with 1 μg of IB4-APC (Biolegend), 1 μg of anti-pig SLA1-FITC (Novus Biologicals), 5 μL of anti-HLA-G1-PE in 100 μL of flow buffer (PBS-1% BSA), and incubated at 4° C. for 30 min in dark. Negative unstained control was also kept at 4° C. and was subjected to all treatments as we did in stained cells. Also, we made single stained tubes: IB4-APC and SLA1-FITC for the positive control of the respective fluorochromes. After that the pig fibroblasts were spun at 2000 rpm for 5 min in microfuge to remove extra antibodies. Next the cells were resuspended again in flow buffer (100 μL) and passed through flow tubes with strainer (BD). After staining, we capped all the tubes carefully to avoid the chances of contamination while traveling to Flow sorting facility (CCRB, University of Minnesota). The collection media was 2.5% complete DMEM (Pen-Step, Glutamax and FBS) per the instructions of the flow sort core facility. The sorting results are shown in FIG. 30.

[0646] Delivery of Live Piglets

[0647] FIG. 114 A-C shows pictures of live births of GGTA1/NLRC5 knockout/HLA-G1 knockin piglets.

[0648] Genotyping by Sequencing

[0649] Next generation sequencing was performed to confirm the correct insertion of the HLA-G1 sequence into the ROSA site. The sequencing was performed on a skin sample taken from a live piglet. The confirmed sequence of the HLA-G1 knockin in the ROSA site is shown in FIG. 115 (SEQ ID NO: 499).

### Example 9. Generation and Characterization of GGTA1 Knockout/CD47 Knockin Cells for Making Genetically Modified Pig

[0650] One strategy to enhance porcine xenografts survival when transplanted to a recipient (e.g., a primate such as human) is to simultaneously suppress the level of Gal alpha-(1,3)Gal antigen (Gal antigen) and suppress activation of macrophages. To this end, cells with GGTA1 knocked out (to suppress Gal antigen) and human CD47 knocked in (to suppress macrophage activation) were generated using CRISPR-Cas9-mediated gene editing technology.

[0651] The GGTA1 Knockout/CD47 knockin cells were generated using similar methods as described in Example 26. GGTA1-targeting gRNA vector, in which GGTA1-specific gRNA (having binding site in exon 1) was cloned under U6 promoter in px330, was transfected with a Gibson assembled GGTA1-CD47 gene hybrid. In the GGTA1-CD47 gene hybrid, CD47 gene was sandwiched between 1000 bp homologous arms (the 5′ side and the 3′ side of cut site) of GGTA1.

[0652] CD47 cDNA was assembled with a left arm and a right arm of GGTA1 locus.

[0653] The primers for the assembly were: CD47 assembly right forward primer: ttgagcctgtgcatcgcagcgt (SEQ ID NO: 236; CD47 assembly right reverse primer: ctacttttaatgcaagctggtgacttggctgataactagg (SEQ ID NO: 237); CD47 assembly left forward primer: aaattaaggtagaacgcactccttagcgctcgt (SEQ ID NO: 238); CD47 assembly left reverse primer: attttgggcttccatgttggtgacaaaacaaggg (SEQ ID NO: 239).

[0654] The sequence of resulting assembly construct comprising the left arm, CD47 coding sequence, and the right arm was shown in FIG. 31 (left arm and right arm underlined). The CD47 sequence was optimized for pig codon usage and was made synthetically and assembled. This sequence was not derived from human cells. It was designed to express with the correct amino acid profile in pigs. The CD47 sequence (Table 12) was optimized for pig codon usage and was made synthetically and assembled.

TABLE 12
Synthetic CD47 for expressing in pig

| | |
|---|---|
| SEQ | atgtggccccttgtcgctgcccttcttttgggctctgcatga |
| ID | gcggctccgcacagctccttttcaacaaaacgaagtcagttg |
| NO | agttcaccttctgtaatgataccgagtgatcccttgattgtc |
| 240 | accaacatggaagcccaaaatacgactgaggtctacgtcaag |
| | tggaaattcaaggggagggatatttatacgtttgatggtgct |
| | ctgaataaatctacggttccgacggattttagttccgcaaag |
| | attgaagtgtctcagctgagaagggtgacgcttccctgaaaa |
| | tggataaatccgatgccgttagccatacggggaattacacct |
| | gcgaggttaccgaactcacccgcgagggggagacgataatag |
| | aacttaagtatagggtggttagctggttctctccaaacgaga |
| | acattctgatagttattttcccaatcttcgctatattgctgt |
| | tctggggtcaattcggcattaaaacgcttaaatataggagcg |
| | gcgggatggacgagaaaacgatcgccttgcttgtcgcaggtt |
| | tggttatcaccgtcattgtgattgtcggagccatcctgtttg |
| | tccctggtgagtatagcttgaaaaatgccactggcctcggtc |
| | tgatcgtgacgtccactggcatccttatactccttcattatt |
| | atgtgttcagtactgccattggtcttacgtcttttgtgattg |
| | ccatcctcgtcattcaggtcatcgcatacatactcgcagtcg |
| | tcggtttgagcctgtgcatcgcagcgtgcattcccatgcacg |
| | gacctctcttgatctctggtctttctatattggcgctggcac |
| | aacttcttggcttggtttacatgaagtagtcgcctctaatca |
| | gaagacgatccaacccccgcgcaacaactga |

[0655] The CD47 gene was targeted to the GGTA1 gene cut site with left and right arms that are homologous to the GGTA1 gene. The GGTA1 gene was inactive in adult islets but the promoter was turned on in blood cells and splenocytes of adult pigs. Therefore, a CD47 expressing pig (from the GGTA1 site) will be a great vaccine donor.

[0656] The assembly was confirmed by sequencing. The sequences of the assembled left arm and right arm are shown in FIG. 32.

[0657] The phenotypes of the cells were examined by cell sorting. Gal antigen was detected by IB4-APC staining. CD47 was detected by CD47-Brilliant Violet 421-A. The cells sorting results were shown in FIGS. 33A-33C (unstained), FIGS. 34A-34C (px330), FIGS. 35A-35C (IB4), and FIGS. 36A-36C (CD47/IB4). Cells with GGTA1 knocked out and cells with CD47 knocked in/GGTA1 knocked out were sorted and purified for somatic cell nuclear transfer. The cell sorting results for the sorted cells were shown in FIGS. 37A-37C (IB4) and FIGS. 38A-38C (CD47/IB4).

### Example 10: The Effect of MHC Class I Deficient Porcine Fibroblast Cells (Fibroblast) on Immune Activation of Human Lymphocytes

[0658] A. Proliferation (CFSE): SLA-I/Gal-2 Knockout

[0659] One strategy to determine the human immune response to xenotransplantation can be the co-culture of genetically modified, MHC class I deficient porcine fibroblast cells, with human PBMCs. Mixed lymphocyte reaction co-cultures were carried out in flat-bottom, 96-well plates. Human CFSE labeled (2.50 μM/ml) PBMCs, were used as responders at 1-2×105 cells/well/200 ul. Porcine fibroblast cells at 1000 to 1×10⁵ cells/well (with or without SLA-I/Gal-2 knockout) were used as stimulators at stimulator-responder ratios of 100:1, 50:1, 10:1 and 1:10. MLR co-cultures were carried out for 24 hrs for cytokines (11-2, TNF-a and IFN-g) effector molecules (Perforin, Granzyme B LAMP-1/CD107a) expression and 5-6 days for measurement of T and B cells proliferation. FIG. 39 and FIG. 55 show the gating strategy used to analyze proliferation data. Results of one human donor are shown in FIG. 40 and FIG. 41-FIG. 44. Results of additional donors are shown in FIG. 56 to FIG. 59.

[0660] B. Proliferation (CFSE): NLRC5-6/Gal-2-2 Construct: SLA-I/Gal-2Knockdown; NLRC5-6/Gal-2 Construct and GGTA1-1/Gal2-2 Construct SLA-I/Gal-2Knockdown.

[0661] Human PBMCs: Pre labeled with CFSE, were cultured with following: Control: Porcine Fibroblast: Wild Type; Condition#3 MLF cells with NLRC5-6/Gal-2-2construct: SLA-I/Gal-2knockdown; Condition#4 MLF cells with NLRC5-6/Gal-2 construct and GGTA1-1/Gal2-2 construct SLA-I/Gal-2knockdown; Culture cell density: MLF cells=4×10\hat{ }4 cells/ml; Human PBMCs=1×10\hat{ }6 cells/ml; Cells density of MLR culture: 2×10\hat{ }5 to 1.4×10\hat{ }5 cells/200 ul/well in 96 well plate flat bottom in duplicate or triplicates (Table 13).

TABLE 13
Testing plate configuration

| | | | | | RED LASER | | | |
|---|---|---|---|---|---|---|---|---|
| | | | | | (633/640 nm) | | | |
| | BLUE LASER (488 nm) | | | | | FL-6 | VIOLET LASER (405 nm) | |
| | FL-1 | | FL-3 | | FL-5 | 730/45 | FL-7 | FL-8 |
| | 530/30 | FL-2 | 670/14 | FL-4 | 660/20 | 780/60 | 450/40 | 525/50 |
| | FITC/AF488 | 575/26 | 695/40 | 780/60 | APC | APC-Cy7 | PacB(401/452) | BDHV500 |
| | BDHB- | PE | PECy5 PerCP | PECy7 | AF647 | AF700 | BV421/450 | AmCyan/PacO |
| | Blue515 | PI | PerCP Cy5.5 | 496/785 | eF660 | APC-H7 | BDH450 | BV500/BV510 |
| BS1 | CFSE | x | CD20 PerCP, | CD8 PECy7 | CD4 APC | X | L/D dye | CD3 V500 |
| | | | 20 ul | 5 ul | 5 ul | | | 5 ul |
| IC-1 | Perforin | IL-2 | CD4 | CD8 | CD107a | Granzyme B | ″ | CD3 V500 |
| | 5 ul | 5 ul | 20 ul | 5 ul | 5 ul | 5 ul | | 5 ul |
| IC-2 | CD8 | IFN-g | CD4 | TNF-a | CD56 | Granzyme B | ″ | CD3 V500 |
| | 20 ul | 5 ul | 20 ul | 5 ul | 5 ul | CD20 | | 5 ul |
| | | | | | | 10 ul | | |
| FMO | CD8 | | CD4 | | CD56 | Granzyme B | ″ | CD3 V500 |
| FMD | 20 ul | | 20 ul | | 5 ul | CD20 | | 5 ul |
| | | | | | | 10 ul | | |

[0662] C. Intracellular Cytokine Staining (ICCS)

[0663] In a parallel experiment (Table 14) total PBMCs cells were stimulated with and without PHA (2 ug/ml) as positive and unstimulated control respectively. Cultured cells were washed and stained with anti-CD3, anti-CD4 and anti-CD8 followed by formaldehyde fixation and washing and intracellular staining with anti-perforin, granzyme B, IL-2, TNF-a and IFN-g (FIG. 45 to FIG. 52). BD FACS Canto II flow, were used to assessed the proliferative capacity of CD8 and CD4 T cells in response to SLA-I knockout porcine fibroblast (F3) compared to unmodified porcine fibroblast cells. Data were analyzed using FACS diva/Flow Jo software (Tri star, San Diego, Calif., USA), and percentage CFSE dim/low was determined on pre gated CD8 T cells and CD4 T cells.

TABLE 14
ICCS Experimental Configuration

| | | PBMCs + | Ratios of Human PBMCs vs FC | | | |
|---|---|---|---|---|---|---|
| | PBMCs alone | PHA | 100:1 | 50:1 | 10:1 | 1;1 |
| WT | 2 × 10\hat{ }5 | 2 × 10\hat{ }5 | 1 × 10\hat{ }5 + | 1 × 10\hat{ }5 + | 1 × 10\hat{ }5 + | 1 × 10\hat{ }5 + |
| | | | 1000MLF | 2000MLF | 10,000MLF | 1 × 10\hat{ }5 MLF |
| #3 | 2 × 10\hat{ }5 | 2 × 10\hat{ }5 | 1 × 10\hat{ }5 + | 1 × 10\hat{ }5 + | 1 × 10\hat{ }5 + | 1 × 10\hat{ }5 + |
| | | | 1000MLF | 2000MLF | 10,000MLF | 1 × 10\hat{ }5 MLF |
| #4 | 2 × 10\hat{ }5 | 2 × 10\hat{ }5 | 1 × 10\hat{ }5 + | 1 × 10\hat{ }5 + | 1 × 10\hat{ }5 + | 1 × 10\hat{ }5 + |
| | | | 1000MLF | 2000MLF | 10,000MLF | 1 × 10\hat{ }5 MLF |

### Example 11: Methodology for Mixed Cell Cultures Including PT85 Antibody

[0664] Mixed lymphocyte reaction co-cultures were carried out in flat-bottom, 96-well plates. Human CFSE labeled (2.50 μM/ml) PBMCs, were used as responders at 1-2×10⁵ cells/well/200 ul. Porcine fibroblast cells/WT or HLA-G transduced at 2000 to 1×10⁵ cells/well (with or without PT85 Ab/blocking Abs, 10 ug/ml) were used as stimulators at stimulator-responder ratios of 100:1, 50:1, 10:1 and 1:10. MLR co-cultures were carried out for 24 hrs for cytokines (11-2, TNF-a and IFN-g) effector molecules (Perforin, Granzyme B LAMP-1/CD107a) expression and 5-6 days for measurement of T and B cells proliferation. In another parallel experiment total PBMCs cells were stimulated with and without PHA (2 ug/ml) as positive and unstimulated control respectively. Cultured cells were washed and stained with anti-CD3, anti-CD4 and anti-CD8 followed by formaldehyde fixation and washing and intracellular staining with anti-perforin, granzyme B, IL-2, TNF-a and IFN-g. BD FACS Canto II flow, were used to assessed the proliferative capacity of CD8 and CD4 T cells in response to SLA-I knockout porcine fibroblast (F3) compared to unmodified porcine fibroblast cells. Data were analyzed using FACS diva/Flow Jo software (Tri star, San Diego, Calif., USA), (Table 15).

TABLE 15
Flow Cytometry Experimental Configuration

| | | | | | RED LASER | | | |
|---|---|---|---|---|---|---|---|---|
| | | | | | (633/640 nm) | | | |
| | BLUE LASER (488 nm) | | | | | FL-6 | VIOLET LASER (405 nm) | |
| | FL-1 | | FL-3 | | FL-5 | 730/45 | FL-7 | FL-8 |
| | 530/30 | FL-2 | 670/14 | FL-4 | 660/20 | 780/60 | 450/40 | 525/50 |
| | FITC/AF488 | 575/26 | 695/40 | 780/60 | APC | APC-Cy7 | PacB(401/452) | BDHV500 |
| | BDHB- | PE | PECy5 PerCP | PECy7 | AF647 | AF700 | BV421/450 | AmCyan/PacO |
| | Blue515 | PI | PerCP Cy5.5 | 496/785 | eF660 | APC-H7 | BDH450 | BV500/BV510 |
| BS1 | CFSE | x | CD20 PerCP, | CD8 PECy7 | CD4 APC | X | L/D dye | CD3 V500 |
| | | | 20 ul | 5 ul | 5 ul | | | 5 ul |
| IC-1 | Perforin | IL-2 | CD4 | CD8 | CD107a | Granzyme B | ″ | CD3 V500 |
| | 5 ul | 5 ul | 20 ul | 5 ul | 5 ul | 5 ul | | 5 ul |
| IC-2 | CD8 | IFN-g | CD4 | TNF-a | CD56 | Granzyme B | ″ | CD3 V500 |
| | 20 ul | 5 ul | 20 ul | 5 ul | 5 ul | CD20 | | 5 ul |
| | | | | | | 10 ul | | |
| FMO | CD8 | | CD4 | | CD56 | Granzyme B | ″ | CD3 V500 |
| FMD | 20 ul | | 20 ul | | 5 ul | CD20 | | 5 ul |
| | | | | | | 10 ul | | |

### Example 12: Blocking MHC Class 1 Molecule/TCR Interaction PT-85 Antibody

[0665] Mixed lymphocyte reaction co-cultures were carried out in flat-bottom, 96-well plates. Human CFSE labeled (2.50 μM/ml) PBMCs, were used as responders at 1-2×10⁵ cells/well/200 ul. Porcine fibroblast cells at 2000 to 1×10⁵ cells/well (with or without SLA-blocking with PT85 10 ug/ml) or with HLA-G transduced Porcine fibroblast/MLF cells were used as stimulators at stimulator-responder ratios of 100:1, 50:1, 10:1 and 1:10 (FIG. 53 and FIG. 54). MLR co-cultures were carried out for 24 hrs for cytokines (11-2, TNF-a and IFN-g) effector molecules (Perforin, Granzyme B LAMP-1/CD107a) expression and 5-6 days for measurement of T and B cells proliferation. In another parallel experiment total PBMCs cells were stimulated with and without PHA (2 ug/ml) as positive and unstimulated control respectively. Cultured cells were washed and stained with anti-CD3, anti-CD4 and anti-CD8 followed by formaldehyde fixation and washing and intracellular staining with anti perforin, granzyme B, IL-2, TNF-a and IFN-g (FIG. 66 to FIG. 74 and FIG. 79 to FIG. 86). BD FACS Canto II flow, were used to assessed the proliferative capacity of CD8 and CD4 T cells in response to SLA-I knockout porcine fibroblast (F3) compared to unmodified porcine fibroblast cells (FIG. 61 to FIG. 65 and FIG. 75 to FIG. 78). Data were analyzed using FACS diva/Flow Jo software (Tri star, San Diego, Calif., USA), and percentage CFSE dim/low was determined on pre gated CD8 T cells and CD4 T cells, FIG. 61 to FIG. 65. The gating strategy used to analyze data is shown in FIG. 60.

### Example 13: Testing HLA-G Transgene Expressing Pig Cells to Inhibit the Human T-Cell Proliferation Response

[0666] T cell proliferation was reduced following stimulation by porcine fibroblast treated with PT-85 blocking Abs compared to control unmodified porcine fibroblast/WT at ratios 10:1 of Human PBMCs and FC respectively. Substantial reduction in T cells (CD3/CD4/CD8) proliferation was observed when human responder were treated with SLA-I blocking PT-85 Abs or HLA-G expressing at 10:1 and 1:1 ratio. No much difference were seen in T cells proliferative response at 100:1 and 50:1 ratio compared to unmodified/WT porcine fibroblast. No substantial reduction in B cells proliferation either with blocking SLA-I with PT-85 or HLA-G expression.

### Example 14: Secreted Cytokine Profile after Mixed Lymphocyte Assay Measure by Luminex Human Cytokine Panel (HSTCMAG-28SK Human High Sensitivity T Cell)

[0667] To determine the cytokine profile of mixed lymphocytes to porcine genetically modified cells a co-culture assay was performed where the supernatant from day 24 mixed cell cultures and controls was collected and the luminex assay was performed. Following the manufacturers protocol, an aliquot of supernatant was removed and incubated with luminex bead for each cytokine, washed, and measured on a factory maintained luminex instrument. Double knock out (DKO) #3 and #4 are genetically and phenotypically GGTA1/NLRC5 knock out cells made separately. The HLAG1 transgenic cells were conducted in a separate experiment and therefore include matching unstimulated and wild type cell controls.

### Example 15: Genetic Modifications of GGTA1-10, Gal2-2 and NLRC5-6

[0668] Primary porcine cells were transfected with: GGTA1-10/Gal2-2 (condition 2), NLRC5-6/Gal2-2 (condition 3), GGTA1-10/Gal2-2 and NLRC5-6/Gal2-2 (condition 4), or Condition 1: cells only (FIG. 90). Bead Selection of Negative cells by using magnetic bead sorting was performed using an IB4 lectin selective for terminal alpha-D-galactosyl residues (such as the product of GGTA1) (FIG. 91). The first bead selection was performed after 5 days followed by a second bead selection at day 8. Cell Sort Selection of Negative Cells using the sort machine from University of MN was done 7 days after transfection. Cells were stained with IB4 lectin Alexa Fluor 467 and SLA I FITC and analyzed by flow cytometry (FIG. 92 to FIG. 102). Confocal microscopy of the cultures is shown in FIG. 103 A. Additional data shows electrophoresis of sequencing confirmation is shown in FIG. 113A to 113 I.

TABLE 16
Exemplary sequencing primers for px333 plasmids

| SEQ | Forward sequence | SEQ | Reverse sequence |
|---|---|---|---|
| ID No. | (5′ to 3′) | ID No. | (5′ to 3′) |
| 241 | cttcgtgaaaccgctgtttatt | 242 | gactggaggactttgtcttctt |
| | gagcagagctcactagaacttg | | aagagacaagcctcagactaaac |
| 243 | ttccactctgggtgtatttaatct | 244 | ccggatccttaagccaaaga |
| 245 | gctcagcctagggtttcaat | 246 | atgagcaaggcaggaatgt |
| 247 | agtttgggactgcctcattt | 248 | ggagcagggaaacctgataaa |
| 249 | gccactgttccctcagc | 250 | cgttgcctatagcgtcttctt |
| | gacccgctctgcacaaa | | cagaggtaacgacgagaacaaa |
| 251 | gacccgctctgcacaaa | 252 | cagaggtaacgacgagaacaaa |
| 253 | ggagttacagggaatccgaatg | 254 | catgaagccaagatctaggaag |
| 255 | ctgctctgcaaacactcaga | 256 | tcagcagcagtacctcca |
| | tgagtgccaaggtgaagttct | | caaagcagtgcaggaagcag |
| | gagtgccaaggtgaagttct | | aagatggcacggatgtgag |
| 257 | ctgccaccgaacctacatc | 258 | gtggtcttgcccatgcc |
| 259 | catcagtcctggtgatgatcc | 260 | gatgagtgggaagatgacct |

TABLE 17
Exemplary Sequences of the first exon of NLRC5 and/or
B4GALNT2 gene to be targeted by guide RNA.

| SEQ | |
|---|---|
| ID No. | Genomic Sequence (5′ to 3′) |
| 261 | caggaggggactgttgcagggggccccaaggcagaagatggcacggatgtgagcattcgggacctcttcagtg |
| | ccaaagccaacaagggcccgagagtcacggtgcttctgggaaaggcgggcatgggcaagacc |
| 262 | atgctgcttgtctcaactgtaatggttgtgttttgggaatacatcaacaggtaattatgaaacatgatgaaatgatgttg |
| | atgaaagtctcctctaatctcctagttatcagccaagtcaccagcttgcattaaa |

### Example 16: Generation and Characterization of HLA-G Knockin Cells for Making Genetically Modified Animals of the Laurasiatheria Super Order

[0669] Cells of animals of the Laurasiatheria super order with HLA-G knocked in can be generated using CRISPR/Cas9-mediated gene editing technology. Knock in of HLA-G can include HLA-G1, HLA-G2, HLA-G3, HLA-G4, HLA-G5, HLA-G6, or HLA-G7. HLA-G can be inserted at a target locus. For example, HLA-G can be inserted into the Rosa26 locus of an animal of the Laurasiatheria super order. Alternatively, HLA-G can be inserted into another target locus such as a glycoprotein galactosyltransferase alpha 1,3 (GGTA1), a putative cytidine monophosphate-N-acetylneuraminic acid hydroxylase-like protein (CMAH), a β1,4 N-acetylgalactosaminyltransferase (B4GALNT2), a C—X—C motif chemokine 10 (CXCL10), a MHC class I polypeptide-related sequence A (MICA), a MHC class I polypeptide-related sequence B (MICB), a transporter associated with antigen processing 1 (TAP1), or a NOD-like receptor family CARD domain containing 5 (NLRC5). A knock-in of an HLA-G encoding sequence targeted to another gene can disrupt, or knock-out, that gene.

[0670] The target region for HLA-G insertion will be sequenced as described essentially in Example 2 above. Accurate sequence information will be used to design guide RNAs specific for the target region as described in Example 2. A plasmid, such as px330, expressing guide RNAs specific for the target region will be generated using methods described in Example 1 and Example 2. Alternatively, a plasmid, such as px333, simultaneously expressing two guide RNAs specific for the target region can be generated as described in Example 3.

[0671] As described in Example 8, the DNA sequence 1000 bp upstream (5′) and downstream (3′) from the target locus cut site will be confirmed. The left homologous arm will be designated as 1000 bp upstream of the cut site, and the right homologous arm will be designed as 1000 bp downstream of the cute site. Generation of homology directing fragments containing HLA-G and insertion of HLA-G at the target locus will be performed as described for HLA-G1 insertion at the Rosa26 locus in Example 8. The HLA-G sequence used can be transcribed as an mRNA with modifications in a 5′ and/or 3′ untranslated region. Such modifications can increase mRNA stability.

[0672] Cells of animals of the Laurasiatheria super order can have knock out of genes in combination with HLA-G knock-in. For example, GGTA1 and/or NLRC5 can be knocked out, and HLA-G can be knocked in. Thus, a GGTA1/NLRC5 knockout/HLA-G knock-in animal of the Laurasiatheria super order can be generated using methods similar to those described in Example 8. As described, the knock-in of an HLA-G encoding sequence can disrupt, or knock out, another gene (e.g., GGTA1 and/or NLRC5).

[0673] Animals of the Laurasiatheria super order can include an ungulate, such as an even-toed ungulate (e.g., pigs, peccaries, hippopotamuses, camels, llamas, chevrotains (mouse deer), deer, giraffes, pronghorn, antelopes, goat-antelopes (which include sheep, goats and others), or cattle) or an odd-toed ungulate (e.g., horse, tapirs, and rhinoceroses), a non-human primate (e.g., a monkey, or a chimpanzee), a Canidae (e.g., a dog) or a cat. Members of the Laurasiatheria superorder can include Eulipotyphla (hedgehogs, shrews, and moles), Perissodactyla (rhinoceroses, horses, and tapirs), Carnivora (carnivores, such as cats, dogs, and bears), Cetartiodactyla (artiodactyls and cetaceans), Chiroptera (bats), and Pholidota (pangolins).

TABLE 18
Sequences for SEQ ID NOs: 5-60

| | |
|---|---|
| SEQ ID NO: 5 | NLRC5 Genomic Sequence |

TGGAAACAACATGAACACTGTGAGCTCCCGGGAGTTCAGTCAGATCCACTGAGGTAGTGGCCGGGTCCAGCGGCCTT
GCCTAACTTGGCAGTCCCCACCCGCTGCATCCTTAGATCTGGCTTTGTCCCTTACACAGGACAGCCCAGGCCTGTGA
TCCCCAAGGTCAGGCTAACGCTACCTGGACCTGGGCTCTAAGACCTGGGAAGCTACAGGAGGGGTGAGCCAGTTCCC
AGATTGGGAAAACTGAGGCTTGAGGCGAGAGGATAGTCATCCACAAGCCTCGTGGCTAAATCCCTGGCTTGGCCCAG
GGCCCTGGACCTCAGGCCACTGGGCTGATCAGTGCTTGTATGCTTTCCTCATCGCACTTGTTTGGAAGACATTCCCT
GGTTTAGCTGCTCTGGGATGGTAATCTATAAATACATACTTTGTTTAAAAAATTAATAAATTAAATCTTGGACCAGC
ATGAGGGCATCTGGCCAGCCACATGGCATATGACATGGACATTTGCCACGTCTCAAATATGGACTGCCCATCACATG
TAGTGCTAGGACCCATGCCAACAACCCACAGGCCACACTGCAGGTTTCATGCAATGTCACATGGAACGCTGCCACGN
NNNNNNNNNNNNNNNNNNNNNNNNNNNNNNNNNNNNNNNNNNNNNNNNNNNNNNNNNNNNNNNNNNNNNNNNNNNNN
NNNNNNNNNNNNNNNNNNNNNNTCACGCCACGACATCCTCACTGTGCTGCATATTCCCGACTGGTCATGCATGTCAT
GTGTGATGGAGGGTGGTCTGTTGGCCATANNNNNNNNNNNNNNNNNNNNNNNNNNNNNNNNNNNNNNNNNNNNNNNN
NNNNNNNNNNNNNNNNNNNNNNNNNNNNNNNNNNNNNNNNNNNNNNNNNNNNTCTGAAGACCGTGCCTGGAAAACGG
CGTCTCTCCCTCCCGGAACAGTGTGCCGGGACAGCCAGCTGAGGCTCTTTTCCTGAGCCCTCTATCCTGGGGGATGG
AAGCGGACATCACTTGGCTGTATTGGAAGGGTCTTGCGGGGGCCGTCAAGCATCCCAGGGGACCTGTGGCTGATGGT
CGAAGAAAGCAAAGTCCAGCCTGGGCTCCCGGCTCTGCAGATGCTGGGCCGTGTCCTGGGGGATGGGGTTATTCCAC
AGGCTGCGGGGCACAGAGACAGACATTCAGCACTGGGAGCTGTTCACTTGTCCTTGTCTCTACCCTCTGTCCAACCC
ACAGATGGGGAAACTGAGGCCCCAAAGGGGAAGAGCTGTTCCCAGAGTTACCTGGCAGGTAGGAGCAGGTGTTAGAC
CAGCATGGCTACCTTAGGGAGATGGTATCCCCCATGCCCACCCCAACTTCTTCCACTCACTCTTCTTCCCTGGAAGC
TAGTGATGCCAGCTGGGCCATGCTCATATGACACATTGTGCAAATAAGGAGAAAGCCCCCCCCTTTATTTCTTTTTG
TTTTTTTTTTTTTTACCATTTCTTGGGCCGCTCCCGCGGCATATGGAGATTCCCAGGCTAGGGGTCGAATCGGAGCT
GTAGCCGCCAGCCTACGCCAGAGCCACAGCAACTCGGGATCCGAGCTGCATCTGCGACCTGCACCACAGCTCATGGC
AACGCCGGATCGTTAACCCACTGAGCAGGGCCAGGGATCGAACCCGCAACCTCATGGTTCCTAGTTGGATTCATTAA
CCACTGTGCCACGATGGGAACTCTGAAAGCTCCCCCTTTTTAGACACTTTATTTCTATCTTCTGAAACTGTCATACT
GAGTTTTATAGAGCGAGACCNCCCCCTTTTTAAGACACTTTATTTCTATCTTCTGAAACTGTCGTAATATACTGAGT
TTTATAGAGCGAGACCCTTCACTACTACCAGAAACCTAACACGTCAACGGTGTGAACAGTGTCCTTTAGATGCAAGG
CCTTGGTACAGTGTGCAGCCTGTGCAACTGTACGTGGTGGCTGTGATTACAGTTATCATTTTAAGCACTTGCTATGT
GCCAGGCATTGTACTCAGTGCTTTGTAGAATCATTTAGTCTGCAGAGCGCCCATCTAAGGCTGATATGATCATTGTC
TCCAGTTTACAAATGAGGAAACCGAGGTTCAGGGAGGTTGAGTTACTGAGGCAAAGTTACACAGTCAGCAACCAGTA
GAGCTGGGATTTGATCCAGGTCTGCTGGCTGCCACATTCCTGGTGGAGTGGGCCAAATCTCCTTTGATAATCCCCAA
TCCAGGAGTTCCTGTTGTGGCGCAGCAGAAATGAATCCGACTAGTAACCATAAGGTTGCAGGTTCAATCCCTGGTCT
TGCTCAGTGGGTTAAGGATCTGGCGTTGCTATGAGCTGTGGTGTAGGTTGAAGATGCACCTCAGATCCCACAATGCT
GTGGCTATGGCGTAGGCTGGCGGATGTAGCTCTGATTGGACCCCTAGCCTGGGAATCTCCATATGCTGCAGGTGCGG
CCCTAAAAAAGCAATAAATAAGTAAATAGATAACCCTCAACCCAGGTCCTGCCTCCTCCTACAGAAAGTTCCTTTGC
ATTGTAGAGGCTGCTGTGGCCCCCACCTCCCACCATCCTCGCCCCTGCAAGTCCTGTTACCGAATGACTTGGATGCC
AGAGCCCTGAGCCAGCCCTTCAGCCAGGAGCCAGGCTCCATGAG

| | |
|---|---|
| SEQ ID NO: 6 | NLRC5 cDNA Sequence |

GGGCCTGTCCTATGGAAAGAACCTGCAAGTCCAGCACAGGGGCTTGGCCGGGAACCCATGAGACCCCCTCTGGGGAC
ATCCTAGGACATCTGTGATGAATCAGGAAGCAGGGCTGGCTCCTCATGGACCCCATTAGTCGCCACCTGGGCACCAA
GAACCTGTGGGGATGGCTCGTGAGGCTGCTCTGCAAACACTCAGAATGGCTGAGTGCCAAGGTGAAGTTCTTCCTCC
CCAACATGGACCTGGGTGCCAGGAACGAGGCCTCAGACCCCACACAGAGGGTCGTCCTACAACTCAGAAAACTGCGT
ACCCAGAGTCAGATCACCTGGCAGGCGTTCATCCACTGTGTGTGCATGGAGCTGGACGTGCCGCTGGACCTGGAGGT
ACTGCTGCTGAGCACCTGGGGCCACGGAGAAGGGCTCCCCAGTCAGCTGGAAGCTGATGAGGAGCACCCACCTGAGT
CTCAGCCCCACTCTGGCCTCAAGCGGCCACATCAGAGCTGTGGGCCCTCCCCTCGCCCAAAGCAGTGCAGGAAGCAG
CAGCGAGAACTGGCCAAGAGGTACCTGCAGCTGCTGAGAACGTTTGCCCAGCAGCGTTACGACAGCAGGAGCCCTGG
GCCAGGACAGCCGGTCGCCTGCCACCGAACCTACATCCCGCCCATCTTGCAATGGAACCGAGCCTCTGTGCCCTTCG
ACACTCAGGAGGGGACTGTTGCAGGGGGCCCCAAGGCAGAAGATGGCACGGATGTGAGCATTCGGGACCTCTTCAGT
GCCAAAGCCAACAAGGGCCCGAGAGTCACGGTGCTTCTGGGAAAGGCGGGCATGGGCAAGACCACGCTGGCCCACCG
GCTCTGCCAAGAGTGGGCCGATGGTCAGCTGGAGCGCTTCCAGGCCCTGTTCCTTTTCGAATTCCGCCAGCTCAACC
TGATCACAAACTTCCTGATGCTGCCACAGCTCCTTTTTGATCTGTACCTGAGGCCCGAGGCGGGCCCAGAGGCAGTC
TTCCAGTACCTGGAGGAGAATGCTAATAAAATCCTGCTCATCTTTGATGGGCTGGACGAGGTCCTCCACCCCGGCTC
CAGCAAGGAGGCTGCAGATCCTGAGGCCTCGGCGTCAGCCCTCACCCTCTTCTCCCGCCTCTGCCATGGGACCCTCC
TGCCCGGCTGCTGGGTCATGACCACCTCCCGTCCAGGGAAGCTGCCCGCCTGCCTGCCCACAGAGGTGGTCACGGTC
AGCATGTGGGGCTTTGACGGACCACGGGTGGAGGAGTACGTGAGCCGCTTCTTCAGCGACCAGCCAGTCCAGGAGGC
GGCCCTCGCGGAGCTGCGGGCCAGCTGGCATCTCTGGAGCATGTGTGTGGTGCCCGCGCTGTGCCAGGTCGCCTGCC
TCTGCCTCCACCATCTGCTCCCAGGCCGCTCTCCAGGCCAGTCTGCAGCCCTCCTGCCCACCGTGACCCAGAGCTAC
GTGCAGATGGTGCTTTCCCTCAGCCCCCAAGGGTTCCTGCCTGCCGAGTCCCTGATGGGCCTCGGGGAGGTGGCCCT
GTGGGGCCTGGAGACGGGGAAGGTTGTCTTCACTGCAGGAGACATCCCTCCACCCACGATGGCCTTCGCGGCGGCCC
TCGGCCTGCTCACCTCCTTCTGTGTGTACACGGAACCCGGGCACCAGGAGACAGGCTACGTCTTCACCCACCTCAGC
CTGCAGCAGTTTTTGGCTGCCCTGCACCTGATGGCCAGCCCCAAGGTGGACAGAGACACACTTGCCCAACATGTCAC
CCTCAATTCTCGCTGGGTGCTGCGGACCAAAGCTAGGCTGGGCCTCTTAGACCACCACCTTCCCACCTTTCTGGCCG
GCCTGGCCTCCTGCGCCTGCCACCCCTTCCTCACACCCCTGGCACAGCAGGAGGAGGTGTGGGTGCGTGCCAGGCAG
GCGGCAGTCATGCAAGCCTTGGAGAAGTTGGCCACTCGCAAGCTGACGGGGCCAAAGCTGATAGAGCTATGTCACTG
CGTGGCTGAGACACAGAAGCCGGAGCTGGCCAGCCTCGTGGCCCAGAGCCTCCCCCATCACCTCTCCTTCCGCAACT
TTCTGCTGACCTATGCCGACCTGGCTGCCCTGACCAACATCCTCGGGCACAGGGATGCCCCCATCCACCTGGATTTT
GAGGGCTGCCCCTTGGAGCCACACTGTCCTGAAGCCCTGGCAGGCTGCGAGCAGGTGGAGAATCTCAGCTTTAAGAG
CAGGAAGTGTGGGGATGCCTTTGCTGAAGCCCTCTCCAGGAGTTTGCCAACAATGGGGAGCCTGAAGAAGCTGGGGT
TGTCAGGAAGTAGGATCACTGCCCGAGGCATCAGCCACCTGGTGCGGGCTTTGCCCCTCTGTCCACAGCTGGAAGAG
GTCAGCTTTCAGGACAACCAGCTCAAGGACGGGGAGGTCCTGAACATCGTGGAAATACTTCCCCACCTGCCGCAGCT
CCGGATGCTTGACCTGAGCCGCAACAGTGTCTCCGTGTCAACTCTCCTCTCCTTGACAAAGGTGGCAGTCACGTACC
CTACCATTAGGAAGCTGCAGGTCAGGGAGACAGACCTCGTCTTCCTTCTCTCCCCACCTACAGAGATGACCACAGAG
CTACAAAGAGACCCAGACCTACAGGAAAATGCCAGCCAGAGGAAAGAGGCTCAGAGGAGAAGCCTGGAGCTCAGGCT
CCAGAAGTGTCAGCTCAGTGTCTATGATGTGAAGCTGCTCCTCGCCCAGCTCCGGATGGGTCCACAGCTGGATGAAG
TGGACCTCTCAGGGAACCAGCTGGAAGATGAAGGCTGTCAACTGGTGGCAGAGGCTGCGCCCCAGCTGCACATTGCC
AGGAAGCTGGACCTCAGCGACAATGGGCTTTCTGTGGCTGGGATGCAACGTGTGCTGAGTGCAGTGAGAACCTGCCG
GACCCTGGCAGAGCTACACATCAGTCTGCTGCACAAAACCGTGGTGCTCATGTTTGCCCCAGAACCAGAGGAGCAGG
AGGGGATCCAGAAGAGGCTGACACATTGTGGCCTGCAAGCCCAGCACCTTGAGCAGCTCTGCAAAGCGCTGGGAGGA
AGTTGCCACCTCAAGTACCTCGATTTATCAGGCAATGCTCTGGGGGACGAAGGTGTGGCCCTGCTGGCTCAGCTGCT
CCCCGGGCTTGGTGCCCTGCAGCTGCTGAACCTCAGTGAGAACGGTTTGTCCCTGGATGCTGTGTTCAGTTTGACCC
AGTGCTTCTCTACAGTGCGGTGGCTTCAGCGCTTGGACTTCAGCTCTGAGAGCCAGCACGTCATCCTGAGCGGTGAC
AGCAGAGGCAGGCATCTCTTGGCTGGCGGATCTTTGCCAGAGTTTCAAGCTGGAGCCCAGTTCTTGGGGTTCCGTCA
GCGCCGCATCCCCAGGAGCTTCTGCCTCAAGGAGTGTCAGCTGGAGCCCCCGAGCCTCTCCCGCCTCTGTGAGACTC
TGGAGAAGTGCCCGGGGCCTCTGGAAGTCGAATTGTTCTGCAAGGTCCTGAGTGACCAGAGCCTGGAGACCCTGCTG
CATCACCTTCCCCGGCTCCCCCAACTAAGCCTGCTGCAGCTGAGCCAGACGGGACTGTCCCAAAGGAGCCCCCTCCT
GCTGGCCGACCTCTTCAGCCTGTACCCACGGGTTCAGAAGGTGGATCTCAGGTCCCTCCATCACATGACTCTGCACT
TCAGGTTTAGCGAGGAGCAGGAAGGCGGATGCTGTGGCAGGTTCACAGGCTGTGGCCTCAGCCAGGAGCACATGGAG
CCGCTGTGTTGGTCGCTGAGCAAGTGTGAGGACCTCAGCCAACTGGACCTCTCCGCCAACCTGCTGGGTGATGACGG
GCTCAGGTCCCTCCTGGAATGTCTCCCTCAGGTGCCCATCTCCGGTTCGCTTGATCTGAGTCACAACGGCATCTCTC
AGGAAAGTGCCCTCCGCCTGGTGGAAACCCTTCCCTCCTGCCCACGTGTCCGGGAGGCCTCGGTGAACCCGGGCTCC
AAGCAGACCTTCTGGATTCACTTCTCCCGAAAGGAGGAGGCTAGGAAGACACTAAGGCTGAGTGAGTGCAGCTTCAG
GCCAGAGCACGTGCCCAGACTGGCCACCGGCCTGAGCCAGGCCCTGCAGCTGACAGAGCTCACGTTGAACCAGGGCT
GCCTGGGCCTGGAGCAGCTGACTATCCTCCTGGGCCTGCTGAAGTGGCCGGCGGGGCTGCTGACTCTCAGGGTAGAG
GAGCCGTGGGTGGGCAGAGCCGGAGTGCTCACCCTGCTGGAAGTCCGTGCCCACGCCTCAGGCAACGTCACTGAAAT
AAGCATCTCTGAGACCCAGGAGCAGCTCTGTATGCAGCTGGAATTTCCCCATCAGGAGAACCCAGAAGCCGTGGCCC
TCAGGTTGGCTCATTGTGATCTCGGGACCCACCACAGCCTCCTTGTCAGGGAGCTAATGGAGACATGCGCCAGGCTG
CGGCAGCTCAGCTTGTCCCAGGTGAAGCTCTGCAAGGCCAGCTCTCTGCTGCTGCAAAGCCTCCTGCTGTCCCTCTC
TGAGCTGAAGAACTTCCGGCTGACCTCCAGCTGTGTGAGCTCTGATGGGCTAGCCCACCTGACATTTGGTCTGAGCC
ATTGTCACCACCTGGAGGAGCTGGACTTGTCTAACAATCAATTTGGCAAGGAGGACACCAAGGTGCTGATGGGAGCC
CTTGAGGGCAAATGCTGGCTGAAGAGGCTTGACCTCAGCCACTTGCCTCTGAGCAGCTCCACCCTGGCCGCGCTCAT
TCAAGGACTGAGCCACATGAGCCTCCTGCAGAGCCTCCGTCTAAGCAGGAGCGGCGTTGATGACATCGGCTGCTGCC
ACCTCTCCGAGGCGCTCAGAGCTGCCACCAGCTTGGTGGAGCTGGGCTTGAGCCACAACCAGATCGGAGACGCCGGT
GCCCAGCACTTAGCTGCCATCCTGCCAGGGCTGCCTGAGCTCAGGAAGATAGACCTCTCAGCCAATGGCATCGGCCC
GGCAGGGGGAGTGCGGTTGGCGGAGTCCCTCACCCTTTGCGAGCACCTGGAGGAGCTGATGCTTGACTACAATGCTC
TGGGAGATCTCACAGCCCTGGGGCTGGCCCGAGGGTTGCCTCAGCACCTGAGGGTCCTGCACCTGCGGTCCAGCCAC
CTGGGCCCAGAGGGGGCGCTGAGCCTGGGCCAGGCACTGGATGGATGCCCATACGTGGAAGAGATCAACTTGGCCGA
GAACAGCCTGGCTGGAGGGATCCCACATTTCTGTCAGGGGCTCCCGATGCTCCGGCAGATAGACCTGATGTCATGTG
AGATTGACAACCAGACTGCCAAGCCCCTCGCCGCCAGCTTCGTGCTCTGCCCAGCCCTGGAAGAAATCATGCTGTCC
TGGAATCTGCTCGGTGACGAGGCAGCTGCTGAGCTGGCCCAGGTCCTGCCGCGGATGGGCCGACTGAAGAGAGTGGA
CCTGGAGAAGAATCGGATCACAGCTCACGGAGCCTGGCTCCTGGCTGAAGGGCTGGCTCAGGGCTCTGGCATCCAAG
TCATTCGCCTGTGGAATAACCCCATCCCCCAGGACACGGCCCAGCATCTGCAGAGCCGGGAGCCCAGGCTGGACTTT
GCTTTCTTCGACCATCAGCCACAGGTCCCCTGGGATGCTTGACGGCCCCCGCAAGACCCTTCCAATACAGCCAAGTG
ATGTCCGCTTCCATCCCCCAGGATAGAGGGCTCAGGAAAAGAGCCTCAGCTGGCTGTCCCGGCACACTGTTCCGGGA
GGGAGAGACGCCGTTTTCCAGGCACGGTCTTCAGAATGGACTTTATGGGCGACAAAGAGCCTACCATGGCCAACAGA
CCACCCTCCATCACACATGACATGCATGACCAGTCGGGAATATGCAGCACAGTGAGGATGTCGTGGCGTGATGCAAG
ACACAGAAGGTTGCACGTGGCAGCGTTCCATGTGACATTGCATGAAACCTGCAGTGTGGCCTGTGGGTTGTTGGCGT
GGGTCCTAGCACTACATGTGATGGGCAGTCCATATTTGAGACGTGGCAAATGTCCGTGTCATATGCCATGTGGCTGG
CCAGATGCCCTCATGCTGGTCCAAGATTTAATTTATTAATTTTTTAAACAAAGTATGTATTTATAGATTACCTTTCC
AGAGCAGCTAAACCAGGGAATGTCTTCCAAACAAGTGCGATGAGGAAAGCATACAAGCACTGATCAGCCCAGTGGCC
TGAGGTCCAGGGCCCTGGGCCAAGCCAGGGATTTAGCCACGAGGCTTGTGGATGACTATCCTCTCGCCTCAAGCCTC
AGTTTTCCCAATCTGGGAACTGGCTCACCCCTCCCGTAGCTTCCCAGGTCTTAGAGCCCAGGTCCAGGTAGCGTTAG
CCTGACCTTGGGGATCACAGGCCTGGGCTGTCCTGTGTAAGGGACAAAGCCAGATCTAAGGATGCAGCGGGTGGGGA
CTGCCAAGTTAGGCAAGGCCGCTGGACCCGGCCACTACCTCAGTGGATCTGACTGAACTCCCGGGAGCTCACAGTGT
TCATGTTGTTTCCAAGAAGGCCCAAGGATTGTGAGCCAAGTTTGATCAATAAATGTGAGTGATCTTCCGGCCTCTAA
AAAAAAAAAAAAAAAA

| | |
|---|---|
| SEQ ID NO: 7 | NLRC5 Protein Sequence |

MDPISRHLGTKNLWGWLVRLLCKHSEWLSAKVKFFLPNMDLGARNEASDPTQRVVLQLRKLRTQSQITWQAFIHCVC
MELDVPLDLEVLLLSTWGHGEGLPSQLEADEEHPPESQPHSGLKRPHQSCGPSPRPKQCRKQQRELAKRYLQLLRTF
AQQRYDSRSPGPGQPVACHRTYIPPILQWNRASVPFDTQEGTVAGGPKAEDGTDVSIRDLFSAKANKGPRVTVLLGK
AGMGKTTLAHRLCQEWADGQLERFQALFLFEFRQLNLITNFLMLPQLLFDLYLRPEAGPEAVFQYLEENANKILLIF
DGLDEVLHPGSSKEAADPEASASALTLFSRLCHGTLLPGCWVMTTSRPGKLPACLPTEVVTVSMWGFDGPRVEEYVS
RFFSDQPVQEAALAELRASWHLWSMCVVPALCQVACLCLHHLLPGRSPGQSAALLPTVTQSYVQMVLSLSPQGFLPA
ESLMGLGEVALWGLETGKVVFTAGDIPPPTMAFAAALGLLTSFCVYTEPGHQETGYVFTHLSLQQFLAALHLMASPK
VDRDTLAQHVTLNSRWVLRTKARLGLLDHHLPTFLAGLASCACHPFLTPLAQQEEVWVRARQAAVMQALEKLATRKL
TGPKLIELCHCVAETQKPELASLVAQSLPHHLSFRNFLLTYADLAALTNILGHRDAPIHLDFEGCPLEPHCPEALAG
CEQVENLSFKSRKCGDAFAEALSRSLPTMGSLKKLGLSGSRITARGISHLVRALPLCPQLEEVSFQDNQLKDGEVLN
IVEILPHLPQLRMLDLSRNSVSVSTLLSLTKVAVTYPTIRKLQVRETDLVFLLSPPTEMTTELQRDPDLQENASQRK
EAQRRSLELRLQKCQLSVYDVKLLLAQLRMGPQLDEVDLSGNQLEDEGCQLVAEAAPQLHIARKLDLSDNGLSVAGM
QRVLSAVRTCRTLAELHISLLHKTVVLMFAPEPEEQEGIQKRLTHCGLQAQHLEQLCKALGGSCHLKYLDLSGNALG
DEGVALLAQLLPGLGALQLLNLSENGLSLDAVFSLTQCFSTVRWLQRLDFSSESQHVILSGDSRGRHLLAGGSLPEF
QAGAQFLGFRQRRIPRSFCLKECQLEPPSLSRLCETLEKCPGPLEVELFCKVLSDQSLETLLHHLPRLPQLSLLQLS
QTGLSQRSPLLLADLFSLYPRVQKVDLRSLHHMTLHFRFSEEQEGGCCGRFTGCGLSQEHMEPLCWSLSKCEDLSQL
DLSANLLGDDGLRSLLECLPQVPISGSLDLSHNGISQESALRLVETLPSCPRVREASVNPGSKQTFWIHFSRKEEAR
KTLRLSECSFRPEHVPRLATGLSQALQLTELTLNQGCLGLEQLTILLGLLKWPAGLLTLRVEEPWVGRAGVLTLLEV
RAHASGNVTEISISETQEQLCMQLEFPHQENPEAVALRLAHCDLGTHHSLLVRELMETCARLRQLSLSQVKLCKASS
LLLQSLLLSLSELKNFRLTSSCVSSDGLAHLTFGLSHCHHLEELDLSNNQFGKEDTKVLMGALEGKCWLKRLDLSHL
PLSSSTLAALIQGLSHMSLLQSLRLSRSGVDDIGCCHLSEALRAATSLVELGLSHNQIGDAGAQHLAAILPGLPELR
KIDLSANGIGPAGGVRLAESLTLCEHLEELMLDYNALGDLTALGLARGLPQHLRVLHLRSSHLGPEGALSLGQALDG
CPYVEEINLAENSLAGGIPHFCQGLPMLRQIDLMSCEIDNQTAKPLAASFVLCPALEEIMLSWNLLGDEAAAELAQV
LPRMGRLKRVDLEKNRITAHGAWLLAEGLAQGSGIQVIRLWNNPIPQDTAQHLQSREPRLDFAFFDHQPQVPWDA

| | |
|---|---|
| SEQ ID NO: 8 | TAP Genomic Sequence |

GTCTGAGAAGAGCTTCACTCAGGAGCATCTGACCCACCAGGAGCCTGCAACATGGTCCAATAGCGCCCCTTATTAGC
CATGAGCTGCTGGTGGGTTCCCTCCTCAACAATGGTGCCTCCTTCCAGAAAGAGGATGTGATTGGCCTGCTCCACGG
AACTAAGACGCTGGGTGATGAGAAGCACAGACCGGGAGTACCGCTCAGGGCTTTCATACAGGAGCGACTCCACCTGA
GAAAAAAACACAGACTCTGTCAGAGCTGGGGGCCACTCCCGGAAGAGCTGGGACAGACCTCGCCAGGATCACTGCCA
CTTCTGCCAGGAACCCCAAAATCAAAGCTTCTCATTCTGAGTGCTTCTCTGTCAAACTTTTGATCTGTTAAGGACGG
TTTACATGAGGGGGCAAGAGCGTGTCCTATGGTGAAACTCATAAGTATGAAGGGTATTGAGTAGCCTCTCCTCTCTA
ATTTTTATATTCTCTTTCAAGGAGACATAAGTGAGTAGTAAAGAGAATGAATATTCGAGTCAGGCAGACTCGAATTT
GGGTCCAGGCTCTGCTATTCAACATTGAGCTGAATGCTATCGAGTGCGTTGTTCAGCCTCTCTTAGCCTGCATTTTA
GCATCTGTTCGATGAAGATAACAACAGCCAGCTCACAAGCATTCACGATGAATAATTAAATGAGAGAGTACATGGAA
AGGGCCTGTTAACATTTCTGGCACATGGTAAGATTTCAACTAATATTGGTATGATGGGATCTTTTCTTTTGTTTGGC
TTCACAGATTCAGAGTCTGAGGATCGTCTCTTTTAACTGACTCTAGGCATGTTGGGGAGAAGCGAAGGGGAACTGAG
AATTGCAAAGACTGGTTTGGATGATTATGATGTTAGTACAATAACAAAGGATGAGTGAAGGAAGGAGGACTGGGTGG
GTTACAGGCATTAAGAAGATGACTCTCTCACCCGTGCTTGACTGTTTGCATCCAGGGCACTGGTAGCATCATCCAGG
ATGAGTACCCGTGGTTTCCGGATCAAGGCTCGAGCCAAGGCCACTGCCTGCCGCTGACCCCCTGATAGCTGGCTCCC
AGCCTCACCTACCTCTGCAGAGACAAGTGCCCAGGTAAGAGCTGGATAAACACATGTGCATCCATGTGCTTGCATGC
ACGCGCGAGCGTGTGTGCACATGTGCACGCACGCACGCGCGTGCACACACACACACACACACACACACACACACTCG
GACTAACAGATACAGCTGGATAGGGAAGGTTCTGGGAAGGTGAAGGAGTTCTGAGGATATGAGGATGAAAGAGCCAT
AGAAACAAGCTCTTACAACTTCATACTGATGAATAAAGGCAAGACTATTGGATTTCAACAAAGGTAAAGATGTCTGA
GCCATAAAATAAAATTTAAAAAAAAAAAGAGTTCCTGCTGTGGCACAGTGGGTTAAGGATGCAACTGCAGGAGTTCC
TGACATGACTCAGTGGTTTATGAACCCAACTAGTATCCACGTGGACTCGGGTTAGATCCCTGGCCTTGCTCAGTGGG
TTAAGGATCCAGCATTGCCATGAGCTGTGGTGTAGGTCAGCAGCTGTAGCTCCGATTCGACCCCTAGCCTGGGAATG
TCCATATGCTGTGGTGCAGCTCCAAAAAAAAGCAAAAAAAAACAAAACAAAACAAAACCCGAATGCTGTGGCTCAGG
TCGCCTTGGAGGTGCAGTTCAATCCCTGGCCTGGTGCAGTGGGTTAAAGGATCTGGCGTTGCTGCAGCTGCTGCATA
GGTTGCATCCGAGGCTTGGATTCAGACTATGGGTGTGGCCATAAAAAACTAGCCCCCCCAAAAAAGATGCCTGGGTG
GTGATATGAGAGGAGAGAGCACCTGTGTCGTAGCCTTGCGGGAGCTTGGAGATGAAGCTATGGGCTCCGGACTCCAC
GGCGGCAGCTATGACTTCCTCCATTGCTGGCTTCTGGCTCAGGCCATAGGCAATGTTTTCTTGAAAACTTCTTCCAA
AGAGCTGTGGCTCTTGCCCCACCGCAGCCACCTGGGACAAAGCATGATGAGAGAACGAGGAACACAGGAGTATGATG
ATCTGGAGACTGAAGACTGAAAATCTTTATTGTGAACAAATCATGAAATCACACAGCCTCTCTCCTGAACACACCCC
CCGCCCCCCCAGGATCTCCTGTCATTCCCAGCACTCCTTTCAGAGTGCCCAGTGAGCATGGTCTTCTTACTCGCAGC
TCCCTGCCCTCCCCTGTGCCACCTTCTTGCTCACCTGTCTGTGCAGGTAGCGGTGCTCATATTCAGGAAGGGGCTTC
TCACCCAGCAGCACCTGCCCCTCCGTGGGCTGGTACAGGTTCTGCAGCAGGGCAGCCACGGTGCTCTTCCCAGACCC
ATTGGGCCCCACGAGGGCGGTCACCTCACCAGGACGTAGAGTGAACGTGAGGCCCTGGAGGCCAGAGAATCACACAC
TAAGAGGCAGATCAAGGCCCCTAACCTTAAGAGCGTCATGGACTTGGCCCATTGTTTTGTCAGTGTCTCACCCCAGA
GAAGAAAAGAGGAAAGTGGAGAAACACAGCAACTCCTACCCTCCCACATGCACAGACTTCTGCTCCTCAGCGATGCC
ACCTCCCCGTGGACTAGAGATGGAAGAAGAGACAAAGACCAGGGCAAAGACCATGCCGCACACTCAATCTCAGAGAC
CAGGAGAAAAAAAGAAAAAAAAAATCACATTTGAAATCACAAATGGAAAGAAAAAGGAGGAGTTCCTGTTGTGGCTC
AGGAGGTTAAGACCCTGACATAGTGTCCGTGAGGATACAGGTTCAATCCTTGGCTTCGCCCAGTGGGTTAAGGATCT
GGTGTGGCTGCAGCTGCCCCGTTCAGTCACAGAAGTGGCTCAGAGCCGGTGTTGCTGTGGCTGTGATGCAGGCGTTC
AGCTCCTGGCCCAGTGTGACCATTAAAAAAAGGAAGAAAAAAGGCAAGAAAAAGGAAAGATGGAAGACCAGATGGAT
ACACAGATTTTGCAGCAGTTCCTTAGGATATGACAGCCTTCTCCCTGAAAGCCTCCTTTCCTGTCCTCCCTGGAAAT
CCAAACTAGGTCTTGAGTTTGGGGCAATTTTATGGAACAGATGATGCTCATCTTTGCCTCTGAAGGGTAAAGAAGGA
TCTAGCTACACCTGATGTTAAGCAGACTGAAGGCAGGAAGACGATTCAGATCGAGCTGAGAGGAAGATTGGTGGAGT
GCAGGGGTTGGTGGGTTGTACCTGCAGCACTGGGACCTCTGGTCGGTTCGGGTAGGCAAAGGAGACATTCTGGAACT
TGACAAGCCCCTCTGACTTTAAGGAAGTCAACGATCCACTGGCCGGGCAGCGAGGGATTCGGTCCAGATACTCAAAT
ATTTCCTTTGAGGAGCCCACAGCCTTCTGTACCCTGGGGTAGGTGGACAGCAGTACCTGGAGGGGAGGTATGAATAG
TGAGATGGGAGGAGGTAGTGGGGGAGGGACCTAATCTGCCTGCCAGGATTATGTGATGTGAGAAGGGCAAAGCATGG
AAGGAAGGTGACTCAGATGGTGATGGGACAGGGGAGGGAAAAGCCCTGGGATGTGAGAATGGAAGGACCTCACCTGA
ACAGCTTCGGTGAACTGGATCTGGTAGAGAACAAATGTGACGAGGTTTCCGCTGCTTATAGCCCCACCTGCCACCAG
CTTCCCGCCAACATACAGGATTCCCACCTTCAGCAACATCCCTGAGATCTGTGGAGAGACCACACAGAAAAGGGACT
TTTGTAGAAAAATCTAGAGGGGCTGCAGAGAAGCAGAATCATTAGCATTAAGGAGATAAGAAGTTCTTGGAGTTCCC
GTCGTGGCTCAGTGGTTAACGAATCCAACTAGGAACCAGGAGGTTGCGGGTTCGATCTCTGGCCTCGCTCAGTGGGT
TAAGGATCGGGTGTTGCCATGAGCTGTGGTGTAGGTCAAAGATGTGGCTCGGATCTAGTGTTGCTGTGGCTGTAGCT
CTAGGGTAGGCTGGCAGCCGTAGCTCCGACTGGACCCCTTGCCAGGGAAACTCCAAATGCCTCAGGTACAGCCCTAA
AAAGCAAAAACAAACAAATAAACAAAAAAAAGGAATGAACCATAGCAATGCCACGGAGTCTCACTCAGTTATACAGA
AAAGAAGCCAATCGTTATTACCATCACCATTATCACCTTGTCTGGGAAGCATTTACTCTGCACAAAAGGCTTTCATG
AATGTAATGTCATCTAATAGTCGCATCAAAAGCCCCATAAACAAGGTTAGGTCACTGCCATTTTTAAAACTGAGAAA
ACAGTCTCAGAGAAGTGAAGTCACCAGCCCCTGGTCACAGAGCCGGAAAATGGCAGCATCGTGATAGGAACTTGATG
GCTGGTCGTGTTCGCTTTCGGTTACATCACAGGTGCCCCTCATCCTTGCTTCTGCTACTCCCAGGACTCTCACTAGC
ATCCATGTAGTGTCAGCATGAAACGGGACAGGGTGCCAGAATTTATAGTCCTCTGAGCACCCCCTTGAGGCAAAAGA
AGGCCTTGGAAAACACTTCCCTAAAGAGAGGGTTGGGTGGATTTTTGTGTACCGTAGTGAAAGGAAGCCATCTAGCA
CGCCTAAAAAGGGGGGAGGGGGTTAGGAACAGTGAGTAGGGTGACTGAGCCTCCGGTTGTTAGAATATGGCCACTGA
ACCAACCACTGGGCAGTGGAGGAAGAGTGTGGAGCAGGGTCATGGGAAAGGGAATGGCATTGAGGCATCTTGGGGAC
AAGGGACTAGGCAGTCATCTGCAGGTGCTCACACTGGTGGTCCAGAGGTCGACCGCATAGGCCAGGGCCTCCTTCTG
GTTGAGTGTCTTCATGTCCTGCAGCTTTTGCTTGAACTTCTGGGCCTCACCCTCTTCATTGGCAAAGCTCCGGACAG
TAGGCATAGCTGACAGAACCTCAATGGCCACCTGGCTTGACTTTGCCAGAGATTCCTGCACCTGTGCTGCCAGCACC
TGTGGAGACGTGGACCAGAGATGCCACACATGATTGTTGACAAACCATAGGGGACACTAGTACCTGAGTTATCCGAT
TAGAGTTTAAAGGTGAGACGTGGCAGAGGGAAGGCAAGGGGACAAAGGGACACAGCCAGGCCCCCAGATACTAAAGG
ATACAGAGAAGAGGAAAATGACTTAGAAGCGTCGTAGGGGAGCATATTCTTGAGATGGGTGATCATGTTCTTAAAGA
CAGATTGTGGGCAGGCATTAGAAGAGAAGACACAAGGGATGTGAAGATCAACACTGAGCAATCTGGGAACATGGACG
ACAGGGACAAGGAGTCCCACAAAGAGGAGAACCAGTGAAGGTGCCAGGAAAGGGATCTGAGCCCACCAAGTCTGGGA
TGAGGGTCAGTGTAGGTTGAGGCAACTCCCTAGACATACCTGGTGCCATTTCCCCAGCTTCTCAGGCAGAAGGAAAA
GCAGTGGCAAGGCGGCCAGGGTGACCATGGTGAGGGGAGGTGACCCCCAGAGCATGAGCCCTAAGAGACACAGTCCC
CGTGCGAGGTACCACAGCAAGAGGCTCAGCTCCGAACTCAGAGACACACTCACAGTGGATGTGTCCTCTGTTACCCG
AGATGTGATGGCACCTGCCAAGGGTTCAAGAGAAGAGAGTGGAGTGAACAGGAGGCTCAGAGTGATGGGAGCGACGA
GCAATGAGCCAGGTGCCACAGCGAAGGGCATCAACACAGTGTTCTAAGAAGGTCAGGAAAAGGAGTTCCCGTCGCGG
CGCAGTGGTTAACGAATCCGACTAGGAACCATGAGGTTGCGGGTTCGATCCCTGCCCTTGCTCAGTGGGTTAACGAT
CCGGCGTTGCTGTGAGCTGTGATGTAGGTTGCAGACTTGGCTCGGATCCGCGTTGCTGTGGCTCTGGCGTAGGCCGG
TGGCTACAGCTCCAATTCGACCCCTAGCCTGGGAACCTCCATATGCCGCGGGAGCGGCCCAAGAAATAGCGGGGAAA
AAAAAAAAAAAAAAGACAAAGAAGGTCAGGAAAACAAGGTCTGTGGTTGGGGGAGGACTGAAACATAATGCAAGAAA
AATGTGTTAGAGTGGAAAAGCCTGGCCAAAGACCTTCGTTTTAACTATAAAGAAATTGATGCCCAGAGTTCCCACTG
TGGCTCAGCGGTTAAGGACCTGACGCCGTCTCTGTGAGGTTGCAGGCTGGAACCCTGGCTTCGCTCAGTGGGTTAAG
GACCAGCTGTTGCCACAAGCTGTGGCGTAGGTCACAGATGCTGGATCAGGTGTTGCCATGACTGGCACAGGCCTCAC
CTGTAGCTCTGATTCAACCCCTGGCCCAGGAACTTCCATATGCCACAGGTGCAGTCATAAAAGAAAAAAAAATTTTT
AAAGAAATGGATGCCCATGTGAACTTCTGTTTCTCTGACAGGTGTCTGTTCCTTAAAGAACTTGTATATACCATGCT
CATAGGTAGGAAGAACTTAAGCTGGTCATACAAGAGCTGGAGAAAAATGGAGAGACTACTAGAGAGCAGTCCAGGAA
ACCACAGCAAGCACTGGATTGGGAATCAAGACATGGGTTCTGCTCTCAAGTTTGTCTTCATCCATGTGCATCCATGC
AAATGTTGGCATTTAGGTCTAGACCTCATTTCACTTCTCTGTAAAATGAGTCAGCTAGACTCTCTAATCTCAAAATT
TCCAGGTTTGAAATTCTACCTAAATACACTTATAGGGATAGTTTATGGAAAAATCTTGGGTGGAAACAGTAGGTTAA
TCATTTTTTTTTTTGTTTTATTGTGTTTTTGGTTTTGTCTTTTTTTTTTTTTTTTTTTTTTTTTTTTTTGCCCTTCC
CACAGCATGCAGAATTTCCCTGGCCAGATGGAACCTCGCCATAGAAGCAAACTGAGTCACAGCAGCGATCTGAGCCA
CAGCAGCCACAGAACTACAGCAGTGGCAACACCAGATCCTTAACCCGCTGAGCCACCGGCGAACTCCAACAGTAGGC
TTTTCTAAAGGTAAAGAGCATATCTTGCTCTTGAAGTACATCAAGAATAAAAAGGGACACCATTTGTGTGTGTGTGA
GAGAAAGATCAAGATTATAAGTAAAAGATGAAGTGTGGGGATACAAATAGAAAACAGACGGATAATGAAAGAGGTTC
ATAAGACACCTGTTTGATTCTTCTGAAAAAACTCTGTTTCTTGGCGCAGGACAGACCGAAACACCTCTCCCTGCAGG
TGGCTGTGCACGCGGCCCATGGTGCTGTTATAGATCCCGTCGCACACGAACTCCAGCACCGAGCTAGAGGGAGACAA
AGAAGGAGGGCCGGTCGGTCAGGGACCCCGTAGAAGTGCACTTTGGAGGGCGGCCCCAACTTCCAACTGCGCCCTTT
TCAGGGTCCCCCGTCCCCAGCCTTCCAAGCTCAGCAGTCAGACCTGGCTATGATGAGGATGGACATGAGAGTTAGGT
TCTGCGTGAAGGCAGCACCTGCCCCATCTCGTAGAATCCAGTCAGTGAGCCGGCCTGTGAAGAACGGAATGGCCATC
TCCCCTGGGGAGGGAGAGGAGAGATGGGCGGGTCAGAAAGAGCAAGTCTAAGCAGCCTAAGCAGCTCAGCTCTAACC
AGGCTGCACCTCCCGCCCATCCTCCCTTCACCCTTGCCCATTATCCTGCAGAAACAGCGCACACTCTCGGCACTGGA
ATGGGCCCCCGGGGAACTCGTAATCCTGTGGCCTCACCAGACCTTTAGAGGGTTAATTAAGAAGCCTAGGATGGTAG
GAGGAAAGAGCTCGCCCAAGGTGGCCAGTGAAGCAACACCTGAGCAGCACTGGAGTCCAGGACTCCTGACTCCCACC
CAGTCCAGGGCTCTTTCCTCTCCACCAAGTGGACCTGAGCGGGGTGGGCTTGCTCTTATCCACATTTCCGAGAACTC
ACACCTGTCTATCTCACTGACCGTTAGGCTTGATTCCTACCCAGCCCTCTAGCCTCCCTCTCCCTCCCCCCGCATCC
CCCTTACCAAGGCTGGAGAGGACCACCAGGGTCAGAAGGAGCCAGAGGTGGCGGATCTCTGAGCCCAGGCAGCCGAG
AAGCCGGCTCACTGTCACTCCAGAGCCTCTGTGACTTCCTTGCACCCAAAGGCTGCTAAGCTTATGCCACAGGGCGG
CCGCGGGCAATGCCGCCGCATAGCTGAGGGCGAAGGCATCGAGGCGACTCCCCCAGTGCAGTAGCCGCGTGCTGTCA
GCCGCTCCCGAGCCCAACTCTCGGAACAAGGCAAGTCCCGGCAGAGCCAAGCCCAGAGCCGCCGCCAGCGGCTCCAA
AGCTGCCAGCCATCCCCGAAGTCCTGTGCTTTTCTCCCGGAAGCCAACCGTCGCCCTGAGGACGCTGCGGGCCCCCA
ACCACAGCACAGCCCAACGGCTCAGGCCCACCACCCAGACCCGGAGCAGCGGCAGCGCTGGGGGCAGCAGCAGGGAG
GATATCCGGGGCAGCGCCGGCCGGAGCAGCACCCAGTCGGCGAGAAGCAGCAGCGCTGCCCCCAGCCAAGGGAGGGA
AGCTCGGGAGACGCAGAGACACCCGCAGGGAGCGGAGGACCCCGAGCTGGCCATTGGCCGTACGAGGTCGACCC

| | |
|---|---|
| SEQ ID NO: 9 | TAP1 cDNA Sequence |

GCCCTTGGGTCGACCTCGTACGCCAATGGCCAGCTCGGGGTCCTCCGCTCCCTGCGGGTGTCTCTGCGTCTCCCGAG
CTTCCCTCCCTTGGCTGGGGGCAGCGCTGCTGCTTCTCGCCGACTGGGTGCTGCTCCGGCCGGCGCTGCCCCGGATA
TCCTCCCTGCTGCTGCCCCCAGCGCTGCCGCTGCTCCGGGTCTGGGTGGTGGGCCTGAGCCGTTGGGCTGTGCTGTG
GTTGGGGGCCCGCAGCGTCCTCAGGGCGACGGTTGGCTTCCGGGAGAAAAGCACAGGACTTCGGGGATGGCTGGCAG
CTTTGGAGCCGCTGGCGGCGGCTCTGGGCTTGGCTCTGCCGGGACTTGCCTTGTTCCGAGAGTTGGGCTCGGGAGCG
GCTGACAGCACGCGGCTACTGCACTGGGGGAGTCGCCTCGATGCCTTCGCCCTCAGCTATGCAGCGGCATTGCCCGC
GGCCGCCCTGTGGCATAAGCTTAGCAGCCTTTGGGTGCAAGGAAGTCACAGAGGCTCTGGAGTGACAGTGAGCCGGC
TTCTCGGCTGCCTGGGCTCAGAGATCCGCCACCTCTGGCTCCTTCTGACCCTGGTGGTCCTCTCCAGCCTTGGGGAG
ATGGCCATTCCGTTCTTCACAGGCCGGCTCACTGACTGGATTCTACGAGATGGGGCAGGTGCTGCCTTCACGCAGAA
CCTAACTCTCATGTCCATCCTCATCATAGCCAGCTCGGTGCTGGAGTTCGTGTGCGACGGAATCTATAACAGCACCA
TGGGCCGCGTGCACAGCCACCTGCAGGGAGAGGTGTTTCGGTCTGTCCTGCGCCAAGAAACAGAGTTTTTTCAGAAG
AATCAAACAGGTACCATCACATCTCGGGTAACAGAGGACACATCCACTGTGAGTGTGTCTCTGAGTTCGGAGCTGAG
CCTCTTGCTGTGGTACCTCGCACGGGGACTGTGTCTCTTAGGGCTCATGCTCTGGGGGTCACCTCCCCTCACCATGG
TCACCCTGGCCGCCTTGCCACTGCTTTTCCTTCTGCCTGAGAAGCTGGGGAAATGGCACCAGGTGCTGGCAGCACAG
GTGCAGGAATCTCTGGCAAAGTCAAGCCAGGTGGCCATTGAGGTTCTGTCAGCTATGCCTACTGTCCGGAGCTTTGC
CAATGAAGAGGGTGAGGCCCAGAAATTCAAGCAAAAGCTGCAGGACATGAAGACACTCAACCAGAAGGAGGCCCTGG
CCTATGCGGTCGACCTCTGGACCACCAGTATCTCAGGGATGTTGCTGAAGGTGGGAATCCTGTATGTTGGCGGGAAG
CTGGTGGCAGGTGGGGCTATAAGCAGCGGAAACCTCGTCACATTTGTTCTCTACCAGATCCAGTTCACCGAAGCTGT
TCAGGTACTGCTGTCCACCTACCCCAGGGTACAGAAGGCTGTGGGCTCCTCAAAGGAAATATTTGAGTATCTGGACC
GAATCCCTCGCTGCCCGGCCAGTGGATCGTTGACTTCCTTAAAGTCAGAGGGGCTTGTCAAGTTCCAGAATGTCTCC
TTTGCCTACCCGAACCGACCAGAGGTCCCAGTGCTGCAGGGCCTCACGTTCACTCTACGTCCTGGTGAGGTGACCGC
CCTCGTGGGGCCCAATGGGTCTGGGAAGAGCACCGTGGCTGCCCTGCTGCAGAACCTGTACCAGCCCACGGAGGGGC
AGGTGCTGCTGGGTGAGAAGCCCCTTCCTGAATATGAGCACCGCTACCTGCACAGACAGGTGGCTGCGGTGGGGCAA
GAGCCACAGCTCTTTGGAAGAAGTTTTCAAGAAAACATTGCCTATGGCCTGAGCCAGAAGCCAGCAATGGAGGAAGT
CATAGCTGCCGCCATGGAGTCCGGAGCCCATAGCTTCATCTCCAAGCTCCCGCAAGGCTACGACACAGAGGTAGGTG
AGGCTGGGAGCCAGCTATCAGGGGGTCAGCGACAGGCAGTGGCCTTGGCTCGAGCCTTGATCCGGAAACCACGGGTA
CTCATCCTGGATGATGCTACCAGTGCCCTGGATGCAAACAGTCAAGCACGGGTGGAGTCGCTCCTGTATGAAAGCCC
TGAGCGGTACTCCCGGTCTGTGCTTCTCATCACCCAGCGTCTTAGTTCCGTGGAGCAGGCCAATCACATCCTCTTTC
TGGAAGGAGGCACCATTGTTGAGGAGGGAACCCACCAGCAGCTCATGGCTAATAAGGGGCGCTATTGGACCATGTTG
CAGGCTCCTGGTGGGTCAGATGCTCCTGAGTGAAGCTCTTCTCAGAC

| | |
|---|---|
| SEQ ID NO: 10 | TAP1 Protein Sequence |

MASSGSSAPCGCLCVSRASLPWLGAALLLLADWVLLRPALPRISSLLLPPALPLLRVWVVGLSRWAVLWLGARSVLR
ATVGFREKSTGLRGWLAALEPLAAALGLALPGLALFRELGSGAADSTRLLHWGSRLDAFALSYAAALPAAALWHKLS
SLWVQGSHRGSGVTVSRLLGCLGSEIRHLWLLLTLVVLSSLGEMAIPFFTGRLTDWILRDGAGAAFTQNLTLMSILI
IASSVLEFVCDGIYNSTMGRVHSHLQGEVFRSVLRQETEFFQKNQTGTITSRVTEDTSTVSVSLSSELSLLLWYLAR
GLCLLGLMLWGSPPLTMVTLAALPLLFLLPEKLGKWHQVLAAQVQESLAKSSQVAIEVLSAMPTVRSFANEEGEAQK
FKQKLQDMKTLNQKEALAYAVDLWTTSISGMLLKVGILYVGGKLVAGGAISSGNLVTFVLYQIQFTEAVQVLLSTYP
RVQKAVGSSKEIFEYLDRIPRCPASGSLTSLKSEGLVKFQNVSFAYPNRPEVPVLQGLTFTLRPGEVTALVGPNGSG
KSTVAALLQNLYQPTEGQVLLGEKPLPEYEHRYLHRQVAAVGQEPQLFGRSFQENIAYGLSQKPAMEEVIAAAMESG
AHSFISKLPQGYDTEVGEAGSQLSGGQRQAVALARALIRKPRVLILDDATSALDANSQARVESLLYESPERYSRSVL
LITQRLSSVEQANHILFLEGGTIVEEGTHQQLMANKGRYWTMLQAPGGSDAPE

| | |
|---|---|
| SEQ ID NO: 11 | GGTA1 Genomic Sequence |

ACTGAGAAAATAATTTATTTAATTTTAAATCAGGAATTTTTATTTTTTAATATTGAACTATTAATAAGATCTTGAAT
TTGTCCATTTGAAATTTAAATTTAAATGATTTTTTTTTAAAAAATCAAGATTCCTTCAAAAGGAAATATCAGTCCTT
TTCTTTAATCTTTGAGAACGAATCATTTCTGTAGTTTGGAACTTGCACCATGAAGTCTCTGCACTCCAGAATGGATT
CCATAAACTTGCGTTATAGAGAAACAAGAGTCCTAATTGACTTGTGATTTCCTTTTTCTTTTACAAGACTACTTCTC
CAGGATTTTTGTTGAGTTATTTTGTTGGGTTATTTTGTTGAGTTATTTTGCTGGGTTGCAAAAATTTTTAGCAAGAA
TTGAAGAGTAGGAGGCCCAGGGAAACAGTAGAGAAAATGTAGGTTTCATTTTATCAAAGAAGCCCATCGTGCTGAAC
ATCAAGTCAGTGCAATGGCTCTTCAAGTAAATCATTTGAAAATGGACACAAATGACCTAAACTGGAACACAAGCAAA
AGTATATCACATACCTGCAGATGTAAATATTGCCTCCTAACTTCCTTTACACCAAACTGCTTAACTTTAAATTACAT
GTAAGATCTCATAGCTTTTCTTAGAGAAAGGGATTGAAAAGCTGTTTAGTCATGAGGACTGGGTCTCCCATTGCCAT
CCTCTCTACTTTGATATAAAATCAATTAACCACTTTATTAAACATGTCCGGCAGTTACACTTCAGTAGTGCAGCTGG
GGCAGGGGAAATGAGAGGTTCCCTGATAAGCAGGCTTTTCCTCTAGTCCACTCCTTGACGGTGGCTCTCAAGTTGCC
CATGATGGGCTGAGGGACTCTGAGAGTTAGAGCAGGTGGCAGCAGGACTTGCTGATGCCTGATTGTCATGAAGCCAA
GATCTAGGAAGTCACTTCAACCCACTGTAGGCCTCTGTCCACTCTGACATCATCCACTTCCTCTGAGCAAGGATTTG
TAGACACAAATTCCAGAGTCTGGCAGACTGAATATGACTTGGCCAAAGCAAGAAGCATCTTCTAAGACAGTGCTGCT
CTAGTTGTCATATGGTTGAGGAGGCTGGAGCCACTCTCATTGCCTCCCATTCAGTGCCTGGATCCAAGCTGTATGTA
CATGCCAACTCCATGCCCTGTGTCTCTTAGAAATGGCATTGCCCCACAGTGATCAGCCCCCTCTCTTTCCAATCTGT
CTTCGCTATTTCATGGCAAACTTACTTAGAAGCTGTGCTTTTATTTCGTGCTGAGCTCCCATTGGTTCATTCGGATT
CCCTGTAACTCCCAACATTCACCATTGGGAATCTTGATCAGTATCTGCGCAGAAGCCAAACAAAACCCTGATGCGAA
AAGGACATGGACTTCAAATAACCTGAAGTCCTCTGCTGTTGAAATCATCTGAGGATTGCTAAGGTAGACTCTGATCT
CCTGCTGCAAAGCAACTCTGTTGCTTTAGACTTAGCAGAGACAGGAAGACGCTAAAATCAAGAGGACGACCCCTCCC
AATCTTATTTTGTTGCCAAACACTTCCCTTTGCATACTTTTCTCCAGTATGACATGTAGAGTGTCTCTGACTTTTTC
TTTGCCTATGACAATTTTTTTTTTTGGTTCAGTTAATAGTATATACCCCCTCAACCCAGAACAGATAAGAAATCATT
GGGAATTTACATCTGATTACTACAGAGTCATTCTCCCATTTGACAAGGCTCAAAGTTGCAAGGAAGAATAATATGTA
CTTACTGTGTTGGTATTTTGTTAGTATTTTTTTAAAAGTTAAAATTAAGTGCTACTTCTCTGAGGAAGTAGCCAGAG
TAATACTCTTTCAAATTCAGAAAACTGCTGGCACAATTTAAAGTCAGATGTTATTTCTAACCAAATTATACTCTTTT
TTCTGCCAAGCTATCTTGACAATCCTAATATCCACAGACATGCCTATATGATAATCCCAGCAGTATTCTGGGGATAA
GATTTTAGTGGGTTTGTTGAGAAGGAAATACTTGTTTAGATGGCTTTCATCATGCCACTCGGCTTCTATGTCATTTT
CCTTGTCCTGGAGGATTCCCTTGAAGCACTCCTGAGTGATGTTTAGAACCTGAGTGGGTGTTCCCCCAAAAATGGCT
GCGTGGTAATAAAAATCCCCCTGGCCAAACGGAATGTAGGCTGCGGACTCCTTCCGCCTCTCGTAGGTGAACTCGTC
AGGATGTGCCTTGTACCACCAGGCCTGTAGCTGAGCCACCGACTGGCCCAGGGTCTCCACCCCAAAGTTGTTTTGGA
AGACCTGATCCACGTCCATGCAGAAGAGGAAGTCCACCTCGTGCTGGATGTGGGCCAGGATGTGCTCCCCGATGGTC
TTCATGCGCATCATGCTGATGTCTTGCCACCTCTTCTCGGACTTGATCTCAAACACTTTAAAGGAACGCAGAGGACC
CAGCTCTATCAAAGGCATCCTGGAGATATCATCCACCATGATGTAAAAGATGACTTTGTGGCCAACCATGAAGTATG
TATTTGCAGATATTAAGAACTCCTCCAAGTAATGCTCAATGTATCTGAAATAAAGAAGAATGGGGTAAATGTAACCT
CTGGGATTTCTAGAGGAGACAATATGCTATTATCATCTAGTCTGTATTTTGCAGTTTAGGAAAGGAATGATTTTTCC
CCATCCTGGATGAGAGACGTCTGTTGCTGTAACATTCCCAGCTACTCTCCACCATTCAGTCATTCAGCTTTGGGGAG
GTGGAGTGGCTTACCTGACTGGTGATTCTGGCAGGGTGGCTGGGCATGCTCAGCCCTGCTCCTTCCTCTCTCACTCT
TGGAAGCCAACCAGGCAGAGAGAACATGTGTTTTCAGCTGCTCTGGGCCTTGCAGTGGTACCTTAGTGGCACAGGCC
CTGCTCCCACATCCAGAGGCCTGCAGTTACTTGTGCTGTATGTGCCTGGATGCCTAAGTCTTTCTAATTCTGTGGTT
CAAGATTTGGAAGCCCAGGGCCTGCAGTTATAAGCCACATACTCCAACACCAGCTTTAACTGTAATGAAGGTGATAA
CTCATTACCATCTGCCTTAATTAGTCTTTATCCCCTTGTCCTTATCAATCAGTTCAGATGCTAGTTCTTCCTTTTTT
CCTGCATTATTCAGATATAACTGACATATATCATTGTGTAAGTTTAAGGTGTGCAAAGTGTTGATGTGATGCACTTA
TTTTTAATTTTTATTTTTTGTCTTTTTAGGGCCACATCCGCAGCATATGGAGGTTCCCAGACTAGGGGTCTAATTGC
AGTTGCAGCTGCTGGCCCATGCCACAGCCACAGCAACACCAGATCTGAGCTTTGTCTATGACCTACACCGCAGCTGG
TGGCAATGCTTGATCCTTTAACCCACTGAGCAAGGCCAGGGATCGAACCCAAATCCTCATGGTTACTAGTCAGATTC
TTAACCCACTGAGTGACAACGGAAACTCCCTGGTACACTCATATATTAGAAATGATTACCACTGTGGCATTACTTGA
CACCTTCATCATATCACATAATTACCATTTTTTTGTGGCAAGAAGACTTAGGACTTATTCTCTGACCAACCTTAAAG
TATATATTACAGTATGATTAAAAACAATCACCATGCTGTACATTAGATCCCAGAGCTTATTCATCTTATAACTGCAA
GTTTGTACCCTTTGATTACCATCAGGGGGCACTAGTTCTTAGCTCTTCCTCAAAAACCCCAGCCTATATTCCAATAC
TTTTACTGACCTACCAGATGCAAGCGTGATGTGCAAGGGTCATTAAGCCTAACCATCGCCACTCTCTTATCCTTCTC
TGGGACCCAAACAATGGATTATGGAATATGGATATTCTTCCATCTTACTGATTTACCCTGTGAGTTTCCCGCTGGTC
ACCCCAAACACCAGCCCATTATCCAGACACCATCATTATAAAACCCATCCAAATATGAGAGCAAACGACCTCTGATT
CAACCTTACTTTAACTATCTCGTTTCATTTAAAAAAATAGATTTTAGTTTTTAGAACATGTTTAGGCTCACAGCAAA
ATTGAGCTGAAAGTGCAGAATTCCCCCCGCTCCCCCCACTCCCACTCCCAGCTTCTCCCACCATCAACATCCAGCAC
CAGGGTAGCACGTGTTGCAACTGATGAAACTACACTGACACATCATTATCACACCAAGCCCGTAGTTTACACTAAGG
TTCACTCTTGGTGGCAGACTTTCTATGAATCTGAACAAATGTAAAATGACATTTATCTATCACTATGTATGGTACCA
TACAGAGTATTTTCACTGCCCTAAAAAATCCTGTGTTCTGTCTATTCATCCATTCTCCCACACCATCGCCTGGCATC
TACTGATATTTTTACTGTCTCCATGGATCAGTACCTTTGACCTTTTCCAGAATGTCATATAGTTGGAACCATATAGT
AGGTAGTCTTTGCAGATGGTTTCTTGGTAACGAACATTTGAGGTTCCTCCATGTCTTTTCATGGATTGATTTTTTTT
TTTAAAGCACTGCTAATACTCCACTGTCTGAATGTGCTACAATTTATCAATTAATTTGCCTACTAAAGGACCTGTTA
CTTCCAAGTTTTGGGCAATTATGAATAAAAGTGCTATAAACGGAGTTCCTTTCGTGGCTCAGTGGTCAACAAACCCA
CCTAGTTGCAGGTTCAATCCCTGGCCTCGCTCAGGGGGTTAAGGATCCAGTGTGGCCATGAGCTGTGGTGTAGGTCG
CAGATGTGGCTCAGATCTCGGGTTACTGTGGCTGTGGCATAGGCCGGCAGCTGTAGCTCTGATTCAACCCTTAGCCT
GGGAACCTCCATATGCCGCAGGTGTGGCCCAAAAAAAACAAAAAAAGAAAAAACCAAAACCCACCCCCCCCAAAAAA
AAATACCTGCTATAAACATCTGTATGCAAGTTTTTGTGTAGACATAAAGTTTCAGCTTTTGAGGGTAAATACTAAGG
TGTGCCATCGCTGGATTGTATGGTAAGAGTATGTTTAGTTTTGTAAGAATCTGCCAAACTGTCTTACAAATTGGTTG
TATCATTTCGCATTGCCAGCAGCAGTGAATAAGCTTTCCTATCGCTCTACATTTTCATCAGCAGCTGGTATTGTCAG
TGTTTGGGATTTGGGTCATTCTAATAGATGTGTAGTGGTATTTTAGCTATTTACCTATTCATTCAAAAACCATCATG
TTCAGGAAGAAAAGGAAAGGGGGGAGTTCCCATTGTGGCAGTGGCACAGTGGGTTAAAGATCCAGTGTTGCTGCAGC
TATGGAGAAGGTCACAGCTGTGGCTCAGAACTTCCATACGCCACAGGTGCAGCTGAAAAAGAAAAAGAGAAAAAAAA
AAACCCATCACATTCCTGTCTTCTGTAAGCCAAGATACAGGCTATTCTGTGAAGCCATGGGGATGATAGAGAAGGGA
AGAAGTAGTTGGCTGGCTTAACACAACCCACGTCACCACCCAGACTCATGCCCAGTGACTGTGCACTGAATTTAATT
TGTTGATCACATTATCAGCCAATGATGACATTTTGTAATAATGACTGGCACTTCCTTTTGTTTTTTGGTTGCTGCTT
GGATTCCCTTTGATTACTACAAACATAAACTGTGCTTTCAATGCTGGTCTCTGGAAACCCCAGGTTTATAGTATTGA
TTCTTTAAACGGAGAGAATATCTCAGCAATACAAGGAGGGACTTCAACATGGCTCTGGGGCTAATGGCCAGGAAATT
CTTCTGCACTCTGGAACTTTAAGAAAAAATCTATTGTGCCCTGAAGCTTGGGAGGTGATCCTAGGGGCGAGGGAGGA
AACCTTTGTGAGGTTTAACATTGTTTAGAGATTAAAGCGCTGCAGTTGGTGCTGTGCACTGTCATTTGAAAATAAAC
CAAACATCACACCTCCTAAAAGTCCAAATCCACTCTTGGGAGGATTTATTGCTGCTGAGTACAAACAGTCCTCACTC
GCCTCAGAGCAGAGTGCGCGGGTTTCACCAGGACATGCCAAGTACAGTTTAGTTCTCTAAAGCTGCAACAAGATGGC
TAGAGCCAATGTGGAGCCGTTCTTTTTGGAAACACCAAGGTTAAATCAATCTGCAGTATGGCTGGCTGGTCTCCTCT
TATACCAAAGGATTAGGTGAGCTGGGAATCTTTCCCAACTCCTAACAGAACATATTCTTCTAGTCGAAAGGTCAAAA
CTCCAGAGTCACCCTTCTCTATTAGAGATGCCACCCAGGCCCCTGGGATCAGTACATTCAGGGACATTAGGACTTGA
TTAGTACAGTGACAGTGATACCTTCTGGGCTCTAGGTTGGAGAAGGTCTCAGGAGGACGCTTAAATCTTCACTCAGA
TCAACCTTGACCTTCACTTCTCTTTGTACAGGCAACAGGTCAACTAACTTCTTTTCTTTTCTTTTCTTTTCTTTCTT
TCTTTCTTTCTTTCTTTCTTTCTTTCTTTCTTTCTTTCTTTCTTTCTTTCTTTCTTTCTTTCTTTCTTTCCTTCCTT
CCTTCCTTCCTTCCTTCCTTCCTTCCTTCCTTCCTTCCTTCTTTCTTTCTTTCTTCCTTTCTTTCTTTCTTTCTTCC
TTTCTTTCTTCCTTTCTTCCTTTCTCCCTTTCTCTCTTTCTCTCTTTCTCTTTCTCTTTCCCTTCCTTCCTTTTCTT
TCTTCCTTCCTTCCTTCCTTTCCTGCTTTTTTAGGGCTGCACCCTCCCAGGCTAGGGGTCCAATCGAAGCTGTGATG
ATGGCCTGCGTCAGAGCCACAGCAATGCGGGATTCGAAATGCATCTGTGACCACACCANNNNNNNNNNNNNNNNNNN
NNNNNNNNNNNNNNNNNNNNNNNNNNNNNNNNNNNNNNNNNNNNNNNNNNNNNNNNNNNNNNNNNNNNNNNNNNNNN
NNNNTTTCCTTTCTTCTCTTTCGGATTTTTTTTTAAGTTTGGTGAAAGTATAGTGTCTTACAATGTTGTGATAATTT
TTCTGTATACAAAGTGATTTCAGTTTCTTTGTGGCTTCAGAAAAGGTACAGATGGAAAGGCCCATGGATGTGGGGGA
GGGAAGGGGCACGGAGGTGAACAGGAAAATTGAACTTTTGCTTTTGTTTTGGAAAAAAAGGGGGGGGGATTCTCTAA
AAAAGAAAACTGGGTTATATTTTAAACGAACATTACAGCTACTACTTTTAAGTAAGAATGTTTACAGTTTGGGGAGA
AAAGTTCCAAACAAGGAAACGGGGGCTGAAACAGGAACCTATCCAACCTCTGGAAGAGGAAGTTCTGAGCAGCCTAA
TCTCCCCGGGCCAAACCCTCCAGGAGGAATAGGCAGAAGGCACAGAGGAGTGGTCAGCCATGCGGACGTGGAAAACC
ACTCCACTTAGGACACTTCTGTCTTTGGTCCTTGGTCTGGGGTCTCGAGAGCATAGGAGAAACGACGCACACACAGG
CCATCTAACAATTGCCATTTTTGGAATTTCCACAGAGGGCCGTGGAGGTCAGGGCGGAGGTGGCTGTGGGTGTACTG
TCGACTCTGGGTGCAGTGGGTATAGCAGATCTTCTTCCCTGCAACCCAAGCCCCTCACCCTGAGGTGGGAAAGAGTT
GACCCTCTGACTAGTTTTATTCTTAGCCTTTGGGGACCTCAGCAGAAGGGAGTCTAAAATGGCCCTGTGACACCATT
CTCCTCTCCACTAATTCAGACATGACATGAACAGCCTCTGTAAACCCAGGGGCCCCTCACCCATCCTCTGATAGTGG
AAGGGGAAAAACTCAAGGCCAGTTTTATTAGCAACACCTACCTTCCGACAGCAAAAACCGTCAAGCCCACGGTAATT
TTCTGTTTGGCATAATAATTATCTAAGACGGCTCTGTTGTAAGTGCCTTCCCATACCACTGGAGCCTTCCATCTGGT
TATGGTCACGACCTCTGGGCGTTTCCTGGTGACAAAACATAGAGTCAGGATGGCTTTGCTAAGGTACGACAGTCTGG
GGGAACATGGGTCAGTCATGGCTTGTGGTGACTGGCCTTGAATCCTGACTGTATTTTAGCCCCAGTCAGCTGGTGGT
GTGACATTGCAGCATCTTCTGGGGGAGGGACAGGAGGCTCTGGCCCAGGTGCCTCTGCGGGCTGCCCTGGTGGCCCC
TTTGGGGATCGTACCTGTACAACGTGTATGTACCTTCCGTCCCCCTGTTCTGCTGTCCTCGTCCTCAATCTTCCTTC
CAAACCCCTTCGCCTATCTCCCCAGGCCCTTCCTAAGCTGCCAGCGACATCTTTGGGTGTTGCTTATCCCAGTGGGT
GCCACCTGACCCTGAGAAAGCCCTATGGCTTGACTAGCGGGATGAGAGAGTGACATTTGAGCTGAAAGAGGAAGAAG
CTGTCTCAGTTTGCCTTCTGCCAGAAAGCAATTTCTGGGTAGGAACCTGGTTATCGGACAAAAAGGGCCCCAGACTA
AGGGGACCTGGTGTTGTGGTTCATTTTACGAAGAAGGAGACAGTCACCCAGAAAAGAAGGGACCCGGCGGGCTAACT
GTGGCCATGGGTGACACACAGGGCTCGGGCTCAGACCTCTCTCAGATCATGTCACCTCTTGACTAGAAGCACAAAAG
CGGGAGGGGAGGGGGCATGTTCTCTGCACCCAGAACACTTGAAAGGGACTTAGCAAAGCCAACACAAACACAGGAAG
CCACGGAAGAGCAACGGACAAATTGTAAAGAGTAAATGCGGGAAGTCTGGGTAGCAGCTGGGGCCCCCCAGAGGCAG
GAGGGAGCTGAGAAGACTTGGCTCAAACCCCATTTGCTCTGGAAGTGGCTGCACTTCCCCGTCGGAAACAGACTGAA
ACGTGGTCATTTAGATTCAACCCCCAACACAACATGAGAGGGCCTGGCCCCTGCTAGCTGTGTGCTTGTATTTCAGC
CACTGCAGGGAGAAGGCCAGTGGTTGGGGCAACGTCTTGGGGGTCCCATCGGGCCCCTGCTGGCTGCCTGGGTATGG
CCCTGGTGAGGCTGTCTAGGAGATGTTAGCCCAGCGAGAACATACCCCCACCCTCATACGCGGGTGGAGGAAGGGTT
TTCACAAACCTGCCCCTCCCCCATGGGAGAAACCATGTTTCCCTGCGAGATTGGGCAAGGCTGGGTCACCCCCACTT
CTTGCTCATGCCTTCTGTCCCTCGTCACCAAGCTCTGCACCCGTATTCTGGAGCTGCCTCTGCCCTCCCACCCCCAC
CCCATGCCCTGCTTCAAGCCTGCTTCCTTCCTCCCCTAAGAGTAATTCTGCAGAGATGGAGGGGACATGGCTAGGCT
GCTCAAACCCCACACCCCCAGCTCTGCCTTCACACCCCAGGTATGACCGCCCCTTGGGGACACCTGCTCTTGGTTTC
CAACAATCATGAAAGAAGCTGTTTTGGACTCTGTACCAACTTGTGCCAGGTACTTTCACATACACTTTCTCTCATTT
AGTCCTTGCAAAAGCTTGGCCATGTAGTATGCTCAATGTACAGATATGAAAATCAAGGCTCAGGAAGGCTTGTTAAC
TTGACCAAGGCCAAACAGCAGATGATGGTAACTAACACACACTGGCTCCTTCCTATGGGACCAGGCACAGTGCCAAG
AGCTTCACCCTTTTGTGGGGGTGGGGTTGCTATATTTTGATTCCCATTTTATCTGTGAGGAAACTGTAGCACAGAGT
GGTGAAATAACTTGTCTGAGGTCACACAGCTAGTAAGGAGCCAAGCTGGGATTTGAACCCAGATAGTCTGACTGTGG
TCTGTGCTCTGAACCACTACCCTCTATGGCTTCTTGGCTATTTACTTGCTGTACCAATGAACTGGAGTTAAAACCCA
GGTATGTCATCATTTCCACTCATTTGAGCTACTTCAGCATTTTTATCAGGGCAGAATAAAAAAAAATGATGAGCTTT
TTTTTTGTTTGTTTTGTTTTGTTTTTAGAAACTTATGTGATGCTTTTCTCACATAAAAGCCCCAGCTTTGTTGAATG
ACTGGATTTCAAACCAAAAAAACCACACACACACACACACACACACACACACACACACACACACACACACAGCTTAG
GCTTATCATTCTATAACCGTTTCCCATGCACTGTCACTTCATTCATTCCTGTCCTTAGTGTAGCCTGTCAAGGATCT
CTTAGCAGTTCAGACCCCAGCCTATCAGTTAAGCCATGCAGCTGTGTGTGAGCTGAACATCTGGCAAGCAGGCAATA
TTATCTTTAAGCAAAGAAAAGGAAGAGAAAGAGAAGGAGGAAGAGGAGGAAAGGAAGGTATTCTTATTTACTAGTCG
CAAGCACTGGGGTTAAGTACCGGACTTTTATTCTCTCATTGAATCCTTACAACCACGTTCAAGAGTGGGTGCTATCA
TCACCTCCATTTCACAAATAAAGAAAGTCGGGGGTGAGAGAGAAGGAAACTATGTTTTTAGCCATTCAACCAATAGG
AGGGGCCACACCAGGGCATCACCTCCTCGATGCACATCTGCCAAGTCCCTGCTCCATCTGCCGGGGCCCAGGGCTAA
AGACGGAGATCAGACCCATCCTACCCCTTGAGAACTTCCCATCCCTGACAGGTGGTCAGCCTGCCGCACACTCCTCA
GCCGCACAACCCCTCAGACTACACCTTCTAGAAAGACCGATTCAGAACACCAGTGTCCAGTTTGGTTACTTGGCTGG
GAAGATTCCTTTTAAGCAGGGGGGAGAAAAAGTAGCAATATTAAAAATTAACGTCGAATTAAAAATTAAAATGCTCT
ATTTCCCAGCTGTTAATTATTAAATTCCACTGGCAATTCCAACATGTCAGCAACCCTGACTAGGAAGCCATATGACA
GGCTGAAAACACTGGCCGTGGGCAGGAGGAGGAGGTGGGAGGATGATTGAGATCAGCTTCCTGGATGAACCTCTGCT
CAAACCCCACCCCCACCCCGGCCCACAGAAAAAGAAGAAGTAACAGCAGGCAGGCCAAGTATGTGTAAGAGCAAGAG
CTGCCCAACGTCATCAAGAGAGGGCTCGAAAAGGAGGGAAAAGTCCAGGAAACACTGGAAACTGCTCAGTTTTTTAA
GCCGGGCACCCACTGCGTTACTTCGGCATGTGGGGTTCCACCAGTGCAAACCAAAGACTTCCACAAAATAAAAGGGT
CTCCAAAATCCAAACGCACCACCTACCTAGGTAGTTGGTAGCTTTTCAATTTTATGTACTTATTTATGGGTACACTG
TGGTCCTGAAGGGCTGGGCAGAGGAAGTGTTAAAATTCTATGAATCATACAGCAGGTGGAAAAAAATGAGGAATGCA
ACAATGTGTTACTTACTGGATTCCTTCCAGGCAGCAGGACGTACACAGTGATCCAGCAAAGAGCTAATGATGCCATG
GACAAGGGTGATGGAGAGAGGGAGATGACGTGGGAAGAATGAACAGAACATGTAGATGAATTAGACTGTGGGCTGGA
TGAAGGAAGGATGAACAGTGAATCATGGAGGTCTCCTGACTCTTGCTTGAGATGGGAAATGAGAAGAATGAGGGTGG
GGTGGAATCAAAAACTCCCTCTGGGAGTTCCCGTCATGGCTCAGTGGGAACAAATCTGACTAGCATCCATGAGGATG
CAGGTTCGACCCCTGGCCTTGCTCAGTGGGTTAAGGATCTGGCGTTACCGTGAGCTGTGGTGTAGGTCACAGACACG
GCTTGGATCTGGTGTTGCTGTGGCTACAGTGCAGGCCGGCAGCTAGAGCTCCAATTCAACCCCTAGCCTGGGAAACT
CCCTATGCCTCAGGTACGGCCTAAAAAGACAAAAAACAAAAAAACAAACAAAAAAACCCAAACTCCATCTGAGTCAT
GCGAGACCTGCAGTGATGTCAGGCAAGAGTTAGACACAACTGGGTGCTCAGAGAAAACCTTTGGGCTAAAGATATAA
ATGCAGTAGTCATTGTCCCATGAATGGTATCTAATGCCACAGAAATGGATGAAGACAGTGTATAAAGAAAAGAGATG
AGGATAATGGACTCAACCTCCAGAAACTCTAACACTTCCTGGCTGAGAAGAGGGAGGGGCCCCAATCAAGGAGACTG
ACAAGGGAGCTGGAGAAGTCGGAGGAAAACTAAGAGGATGTGGTGCTACAGAGGCTGAGAGATCTTGATGTAAAAAT
GTATACAGAATACACTTAATATGTTTCAGGTAGAATACAGAGGACACATTTCTATAAATATATCTATAATATATTTC
TATAAATATATTAATTCAGTGGCTCATCTTTCCTGCATTTATGCAAGCAATTTACTTTGGTGCCCTGAGAAGGCTTA
GATTAGTGCTACTACATATCAATATTCTTTAAATATCTGCTCAGCATTCATTTGGAGGAGAAACTGAGCCATGCATG
GGGGAAAGTGGAAAGAGTGACAGTGGGTGGCTGTGGTCTTTCACCTCTGACCCCAGTGATTCAGCCCTGGCTCCACC
TCTCAAGTCCCACTCAGTAAAGCACAAGTACCACGGTCAGTGTGCCACTCTCTCTTGAAGGGAGCTTGGTGACTGTC
TCTAGCTGATCTATCTGGCCCCTGGGGAGTCTCACACCTCCCCACATGCACACACATCTAAGGGGCTTATCAAAGCT
CTGGTGGGAGTTCCCGTCATGGCACAGCAGACATGAATCCAACTAGTATCCATGAGGTCGCCAGTTCGATCCCTGGC
CTCACTCAGTGGGTTGGGGATCCTGCGTTGCTGTGGCTGTGGTGTAGGCCAGCTGCTGCAGCTCCGATTAGACCCCT
AGCCTGGGAACTTCCATATGCTGCAGGTGTGCCCCCTCAAAAGAAAAAAAAGTTATAGTGCTTCCACATTCTTCCAC
TTCCAGGAGTAGCTTAGCATTCCATAGATGGCTACCCTGTGCCCAGCTCCTCAAATAACACATGGGGAGGCCAAAAT
TCCCATTCTTTCACACTGACATGGACCTCCCATCCTAAAACAGTAAGAAACTTGCCAGAACATACTCAGTCCTTCCA
GAGTCCAAGACCCCTCATGCTGGAATAGATGCTATTCTCCTCGGATCCTCCTCCTACCTCTACTGCTGCTCCCACTC
CGTTTCAGACTTCTTTTCCTCCCTCCCCTGACCCTTTAAGTGCTGATGTCAGATAAGACTCAGCTCTGCTCCTCTGC
CTGGACTCTGATGGCTCCTCTTCCAATGTCTCTACCACATATCTTCTGCCAGCTTAAAGGCCCTGCTGTACACTGAC
GATTATGTCTCCCCCAAATTCGTGTGTTGAAACCCACCCTCAATGTAATGGTATTAAGGGGTGGGGCATTGGGGTGA
TTAGATCCTGAGGGTGGAACCCTCAGGAATGGGATGGGTGCCCTTAGAAAAGAAGCCCTGGAGAGCTCCCTCTCCCC
TTCCATGGCCTAAGAACACAATGAGAAGACGGGCATGTACAAACTAGAAAGTGGGTTCTCACCAGACACCACATCTG
CTGGTGCCTTGATCTTGGACTTCCCAGCCTCCAGAACGGTACAAAATACATTTTTGTTGTTTATAAGCCACCCCGTC
TATGGTATTCTGTTACAGTAGTCTGAAGGTCTAAGATAGGCTCTCCATGAACTCTATCCAAATGCCCCACAGGTACC
TGAATCCACCTACATCCTTAATCAAGCTCATCACCTCCCCTATTCCTAGACCTGTATCTCCTCCTCCAGTCCCTTTC
CTGGTCAACGGCACCAGCATGCACCAGTCTCTCAGGCCTCCCAGTCATCCCGGACAGCCCCCACCTTCTCACTCCCT
TCCACATCCTTTCAAGTCAGGTTAATCACACCGCCTTACCAATCTTGGCAAATGCTAGTTTCACATCTAGTGCCCCT
ATAGGACTGTAAACTTCTTGAATATAAGTGTATTGATTAATTTCTCCTGTCTGTCTCCTGTGCCTAACACAATGTCT
AGTACCGTGACTCATAGTGAAATATATCCTACGTCACAAACACATGCACATACACATATGGAAGCAAAAATGCCACT
AAACAATACTTATCCTTACTTCATGAGATGCCTTCTGATTTCCTATTTGGTTTCAATTTTTGACCCTTAAGCCAGTT
TCTAAACACATTAATGGATCAAATAATAGTCTGACACACATGGGCTAGCATATCATAGGTGTTTTAATGAACATTGT
TGTATGCTTGCTTAGAGTGTGTGCATGGCCTTGTAAGGTTTTTTAATCATCACTGCCATTTTATTTTATTTTTATTT
TTTTAGGGCCACAGGTGCAGCCTATGGAAGTTCCCAGTCTAGGGGTTGAATCGGAGCTGTAATTGCCAGTCTGCACC
ACAGCCACAGCAACACCAGATCTGAGCCTCGTCTTTGACCTACACCACAGCTTGCAGCAATGCCAGATCCTTAACCC
ACTGAGTGGGGCCGGGGATAGAATGGATACTAGTTGGGTTTGTTTCCACTGAACCACAATGGGAACTCGCGTCATTG
CCATTTTACAGAGGAGTTAACCGAACCTAAGAATTTTCTTTATCTGATTCTAGATTCTGTGGCTTTCCACAGCACCC
CATGGGCTATAGGACCTCTCCTAGCCCCAGTATTTTTTTGCTTTTTAGGGGCTGCACCCGCAGCATATGGAGGTTCC
CAGGCTAGGGGTCAAACTGGAGCTACAGCTGCCGGCCTACCACAGCAACGCCAGATCCGAGCCACGTCTGCAACCTA
CACCACCGGTCATGGCAACGCGGGATCCTTAGCCCACTGAGTGAGGCCAGGGATCCAACGTGAAACCTCACAGTTCC
TAGTTGGACTCATTTCCGCTGTGCCACCACGGGAACTGCTAGCCCCAGTATTTTGTGATTCATCTGTTGCCATTGGC
TAATTGCTGTCAGAATCACTATGTTGTTGCGCAAACATTTGAGTCAAAACATCCAGACTCCCCACCTCCCGGGATGC
CACGCCAGTCACTCACACACACACACACACACACACAAAATCCGGACCCTGTTTTAAGGGTCTAATAGATGCTAAAA
CTCTGTCTCCCCTGTCGGGAATGTTCTCATGGCCCTGTTGCCTACACAGCCCCTGCCACCTCCTGCTGAGCTGTGGA
TTTACTGAAATAGGGCAACGCTTCTTTTCTTACTCAGGATTAAACCAGTCCACTAGCGGAAGCTCTCCTCTGTTGTC
TTCTTTTCTTTGTTCCTTTTCGTTGCCTATAGCGTCTTCTTCTTCGTGGTAACTGTGAGTCCTACGTACAAACGGAA
AACAAGCTGAGGAAGGCAGGGAGGGTGACCCATGTGCCAGAATGAGAGTGAGGATCTTGTGAAAACAGATTCCAAGG
CAGAGAACACGTGCGCCAAGCAAATGTCTACAGAAGGCTTGTGATACTAAACATTTATTCGTAAAGACGTCCGTCTG
ATGAAAAGGTTCAGTGCTCCCCTTTTTCATCATCCTTCCAGACCAGCACAGTTAGCAATGTAATGACCCAGCAATTC
TCAGGTTCTGTCAGGAGCAGGGAAACCTGATAAAACAGTCCTTATCAGCGTATGTAAGCTCATGACAGCCTTTCCTG
CAGCCTCAACTTCAGCCTGAGCCTCACTCACTCCCACATCAAATGGGAAAAAACAAAACCTTGAAAACCAAACTTAA
TGCCCATCCCCACCACGCAACAGAGTCCTTGCATGATTCCAATAAGCCAGAAGGACGAGGCGACTGAGAAGGTCATG
GCTGTGAAACCATTTTATTTGGACTCTACAGCCTTGAGCAGATACACAGATGGCCGTTTCCCAGTCTTACCCATTGT
TAAACCAGCTCGGAAACCACCAGCCCCTCTGAGCACTGCTGCCAACTTCTGGGTTTCTAAGAAATGAAAAAGATGAC
AAACATTTTTTAGAAAATGAGGCAGTCCCAAACTGGGGCAGGGGGTGGGGGGTGTTCCAAACTCTTTTTATGGCAGA
TCACTTAAAATCATTTTTTAAAAAATCACTAATTCGTAAAATGAACAGAAATGAAGCTGCTCCAGCTGAATGACTGA
GGATGGACCCGACACTCCCCAGATCTCCCCTCCCTTGGGTGGCCCCCGGCACTCCGCTGGTCCAGGGAGCCCTCGCA
GGAAGAGAAGGGGAGAAGAAGAATGACAAGGGGGAGGGCACTAATCCATAAATCCAAGTCCTGGATCTGCCCCTTTC
CTGTTGTGTAACCCTGATAGGACATTTTTCCTCTCTGAATCGCCATTGCCTCCTCTGGAAAGTTAGAGAACAATGAC
AGCACCAAACCTACCATGAAGATGGATGGCTTCGAAGACTAAACAAAGTAGCCTACGTAAAAGAGCTTTATAAGCTG
AAAATTACTGTAGTAAGTTGTAGTCTTAAAAAAGAAAAGCCCACATTTCCAAGAATGATCTCTTGCTAAATGAGGAG
AACTGGAGTTGCTACAAAGGTCAGCAGTGACAGATTCAGGAAACCTGAGGGTTTCTAAACCCGAAGCTCAGCAAACT
GTAATCAGAAGCCGTTTTTCTCCACACACATGCTCAGATGTCCACACTCACTGTGAGAGTCTCTCCAAGGCGTGGAC
CGTCTAGAGGAGGGACAAGAGGGGGAAAGCCAGGAGCTGCCATGCCCTTTGGTTGGACAAATGAGGTGGTGAGGCAG
GAATAGGCATAGTAGTAAGAAACTTACTTTATTTTACTTTATTATTTTATTTTTTTTGTTTTTTTAGGGCCGCACCC
GTGGCATATGGAGGTTCCCAGGCTAGGGGTCTAATTGGAGCTGTAGCTGCCGGCCTACGCCACAGCCACAGCAACTT
GGAATCTGAGCCGCCTCTGTGACCTACACCACAGGTCACAGCAGCACCAGATCCTTAACCCACTGAGCAAGGCCAGG
GATCGAAGATGCATCCTCATGGATACTAGTCAGATTTGTTTGCACTGCGCCACAACTGGAAGTCCAAGAAACTTAAA
GTCCATCTACTTTCAGGAAGTGCTTGAAATGGCTTATGAAGAAAGTGTGGTTACGATAAATAGGAAAACAATACAAG
AATCAAAACAAAACAAAACGAAACAGAGAAACATTTTAGTCACTCGGGTGTTTTCACATGACTTTGGTCATCCCAGC
CACTCTGTGAGAACAAAATCTTTAACTTTATTTTTACTTCATAGCTAAGATATTGGCAAAATGAGTTTGAGCAAATT
GCCAAGATCCCATGGCATCTAACAAAAGCCAGGATTTAACACCAGGGGATAAATCATATCAGATGAAGGCTACTATA
AATCAGCTATACTTTAATAAGAAAAAATGTTTTAAAAAAAATGAAGGCCAAGGAAAATGCAAGCATTTAAGCACAAT
ACTTTGCTCTAAGCTTCCTAGCAACCAAGTCGAAGATAGGAAAAAAAATTTAGAAAAATGAAGGCTTAGAGTCCTTA
ATCACCAGTAATAGTAATAATAATAAATAATAATAATACACACACTAGTTTATCAGGACACCCAGCCTTTCTTCCTA
ATCCTTTGTCTTGGCAAAATTTCTGGCAAGGGTCTTTATACCACATGTAGTAGGTAGCATAATGGATAATATCTACT
CTGATTCTTTTTTATGAGCAAGGCAGGAATGTTCTCCAAACAACATCACTTAAAGAGATAGATACTTGATGAGAAGC
AAAGGAAAAACACAACTCATGCTCTAGAAAGGCAAGTCTAGGGGCTGGAGAAGTACAGCTCAGACCCCTGGAACCCC
ATCCCTCTCCTCCACCTAGGACCACAAGTGTGTCACCACCTGCCATGTTAAGAATGGACTGTAGGGCCACCAGGGTC
ACATGGAAGGTGACCTAGAGATATCTGGAATTCAAAGCACTTACTTTGACTGGTATATCCAGAACAAAGAACCTTCT
GGGCTAAAAGCAAATGGAAATAAAAACATATCATGTTACTTGGAATGCAGAGAAAAGCTATTTTGCAATCATTATCA
TTGAAACCCTAGGCTGAGCTGAGAGCCTGGGTTGTGGCTACTCCCAGGTTTCCACCTTCGAGATCGAAAAAATGATA
TCACGGGACTCTCGTCATTTCAGAATTACTCAGATCAAACGGTGGGAGGGAGGTCTCTGGAAAATATCAAATCTTAG
TTTAAAGAAAAAAAAAATAGATGGCAGCTCTTATTGTCCAAGGTGGCTTTGCTGAGGGAGAGAGGCTCCAGAGATGG
GTCCCAGGAAGACCACAGCCCACCCATCCCTCACCCAGGATTTATCTTCCTCCAGAAAAACAGGTCTTGCCTCGCTG
GCTCAAAGCTGTCTACAGAGTAGCCTCAAAGGGCACTTCTAGGAGTTCCTGCTGTGGCATAGTGGGTTAAGAATCTG
ACTGCAGGAGTTCCCATCATGGCTCAGTGGTTAACGAATCCAACTAAGAACCATGAGGTTGCGGGTTCAATCCCTGG
CCTCGCTCAGCGGGTTAAGGATCCAGCGTTGCCGTGAGCTGTGGTGTAGGTCACAGACAAGGCTTGGATCCTGTGTT
GCTGTGGCCGTGGTTTAGGCCGGCGTCTACAGCTCTGATTCGACACCTAGCCTGGGAACCTCCATATGCCGCACCTA
GAAAGGCAAAGCCAAAAAAAAAAAAAAAAAAAAAAAAAAAGAAAAGAAAGAAAGAAAGGCAGAAAAAGAATCTGACT
GCCGTGGCTTGGGTCGCTGTAGATGCACAGGTATGATCCCTGGCCCAGCACAGTGGGTTAAAAGATGTGGTGTTGCC
GCAACTGCAGCTCAGGTTGCACCTGTGGCTTGGATTCAATCCCTGACCCAGGAATTTCCTTCTTTCTTTCTTTCTTT
CTTCCTTCCTTCGTGGAATTTCTATATGCCATGGGTGTGGCCATTAAAAAAAAAAAAAAAAAAGGTACTTCTTAAGC
TAACAAAAGCAGTGAGACCATCCTACAAGACGGGATCAGTAAATATATGACGACTCTAGCAGACCGCCTCCATTCAT
TCAACAAATACCTGCTGAGCATGCGTTACATGTCAAGTGCCAGACATACAGTGTTGACTGAAACAGACACCATGTGT
CTGTGGTGTAGAGAAGCTGGCAGGGAGGGTGGACCCTATTTTGATAAACACATCATTATAGGACTTCAAAACTCCAA
GAAAGCATAGGAGCACTTAACAGGAAGACCTCGAAGGCTCCCCAGGGGAGGGGATGATGTTTTAGCTGAGTTCTGAA
GGATACATAGGAGGCCCAGTGAAGAGGGATTAGCAAGAGTGTGCCTAACAGAGAGAAAAACATGCAAAGGCCCCAAG
AAAGGAAGGTCGCATATTTATTTATTTATTCATTTATCTTTTGGGGTTGCACCTGCGGCATGTGGAAGTTCCCAGGC
TAGGGGTTGAATTGGAGCTACAGCTGCTAGCCTACACCACAGCCACAGCAATGCCAGATCTGAGCTGTGTCTGTGAC
CTACACCACAACTCACGGCAATGCCGGATCCTTAACTCACTGAGTGAGTCCAGGGATGGAACCTGCATCCTCATGGA
TACTAGTCAGATTCGTTTCCACTGCGCCACATCGGAAACGCCTGCCCTCATCTCTTAAAACAGAAACAAAAAACCAC
TAACCACTAATATTTGTTTGAGATTCTGCCAAAGCCCCGATCTCCTCCCTCTGCCTTCTGCCCCAGCTGGGAGTCCA
CATCTCCTGGTAGGAATGAAATACATGCCTTCCTACCACCTATGGTTTCCCCTCTAAGCTCAGTACCCATGGACCCA
GCTCTAAAGTCCCTTGTTTCTAAATCTGTCTATTGATCTGATAATATTCATAATAGCTAATAGTTGGCTGGGGACCT
TTCTAAGCAACTGACATGTATTAGCTCATTAAATTCTAATAACAGTCAATGAAGGAGGTTCTATTCCTCCTCAGAGG
GACAGAGGCAATAAATTATTTTGCCCAAGGTCATACTGCTAAGGGAAGAAACAGTATTTGAACCTGGGGAATCTGAC
TTCAGATCCTACAAGAGGGGGAAGGGAAAGGGGCAAGAGGAGGGGGAGGGCCCGTGCCACCCAGCACTCAGGAGCCC
CACCCTCCTGCCGAGGCACTCAGGGCATCAATTTATAGATTTGGATTTGCCACCTCGTCCCATCTTTTTAGTAACCC
CTCCCTCTTCCTCATCTCACCCTCCTTTCCCAGAAGCCTTCAACACCTCAGGTCACAGCAACAACCACCCTGAAGTG
TACGGCATTTAACACATATTCATCCTTCAAGGCACAGCTCGGATGCCATCTCTTCTGAGCCTTCTTTGGTATGAACC
TAGCACAATGCCTGGCATACAGTAGGTGCTCAATAAATATTTCTAAATGAGGGAGTTCCCGTCGTGGCGCAGTGCTT
AACGAATCTGACTAGGAACCATGAGGTTGCAGGTTCGGTCCCTGCCCTTGCTCAGTGGGTTAACGATCTGGCGTTGC
CGTGAGCTGTGGTGAAGGTTGCAGACGTGGCTCAGATCCTGCGTTGCTGTGGCTCTGGCATAGGCTGGTGGCTGCGG
CTCCAATTAGACCCCTAGCCTGGGAACCTCCATATGCCTCGGGAGCAGCCCAAGAAGTAGCAAAAAGACCCCCCCCC
AAAAAAATAAATGCAAAACATAGATCCATCTCCAAGCCAAACATAATCTTGCCCTCCCTGAACTCTCACGTTCCTTT
GCTCTCTCTCTCTGACATCCTCCTTCTAGCCTGTGTTGTTGGGCTTTCATGGGTACCTCTGCCTGCTCCATCTACAG
CATAACCCCTTGAGGGTAGGGATTCTCCTTGGCGCACACTGTACCCCTCGCAGCATTTGGCATGAACAACCAGCTCC
AGAAGGAGCCCCAGATGATGAATCAGAAGATCTGAGTTCTAATTAGAAGTTAGACATAAGTTCACTGTTAAGGCATT
TCACCTACTTGTCCATCGCCTGAACAATGGAAACCTTGACTAAAGGAAGGGTTACCCAGGTTACCCAAGTCAGACAG
CCCTGGACCTAAATCTTCCTAAAAATGTGACCTTGAACGTTCACATTTAATATTGTGGAAACTCAGTATTCCTCATC
TAGAAATGTGGACTAACACTGACCTTCCAGGGCTGTTTTAAAAACAGGAGGGAATGAACAGTGGAGTTCCTGGCACA
AGCAAACACTCAATAACTAGTAGCCGCTAACATCAAAATCACCATCACCATCATTACTTTATTATAGCTCTTAAAGT
TTCTTCCACCTCTAAAATTCTAAGCTTGTGGCTCAGTGGCTTAAGAACCCAACTAGCATCCATGAGAATGTGGGTTC
AATTCCTGGCCTCACTCAGTGGATTAAGGATCCAGTGTTTGCCATGAGCTGTGGTGTAGGTCACAGACGGGGCTTGG
ATCTGGCGTGGCTATGGCTGTGGTGTAGGCAGCTCTGATTCCACCCCTAGCCCAGGCATTTCCATAGGCCACAGGTC
TGGCCCTAAAAAGAAAAAATAAATAAATAAAATTCTAAGATTTTTTTTTTTTTTTCATCTAGCCTTTAACCAAATGC
TGTCCTGGATGACATTCTTAAACAGCTGTATGTGTTTGATGGAGTTATTTTGTAAATCTCTTTTTTTTTTTTTTTCA
AGGGCCTTACCTACAGCACATGGAAGTTCCCAGGCTAGGGGTCAAATCAGAGCTGAAGCTGCCAGCCTACACCACAG
CCACAGCAACACCGGATACCTGACCCACTGAGCGAGGCCAGGGATCGAACCTGAATCCTCATGGATACTAGTTGGAT
TTGTTACCACTAAGCCACAACAGGAACTCCTGTAATCCTCTTTAGCTACAGTGCTACCCACCTGTCTAAGGTTAGTG
CCCTCAGCTCACCTCAGACCAATTCACAAGGTGGCAAAGAATCTCCTGCCTTTTAAACCCCTTGCAGATGTTCAAAT
AGATTCCTCACATTGAAGAATGATGTGGCTGCAGTCTGGGTGCCAGACTACGGCCCTGAAGAGCAGCCAGAATCTGC
TCCAGTTACTGTGAAGAGAGAGTGTGCCCAGCACTGCAAAACAACCCTCTTTATGGGAGGCCAGCACCAATATGCAC
TTCTGGGCCTTTGGCTTCTGTGTTTTAATTTTGTGAAGTACCCAAAATATGGAAGTATAACTCTGGCTGCAATTCAA
AACAATCAAGAGTTCAGAGCTTGAAGGTTGCCTACACAAGCATCTCAACTCAGGTCAGGAACCCCATGGGGAACTTG
CTCTTCTGTTAGATTCTTTCAGCCCCTAGAATTTTTTCTTTTTCTTTTTCTTTTTTCTTTGTAGGGCCAAACCTGTG
GCATACGGAAATTCCCAGGCTAGGGGTAGAATCCGAGCTACAGCTGCCAGCTTACACCACAGCCATAGCAACTCCAG
ATCCTAGCCATGTCTGCAATCTACACCACAGCTCATGGCAACACTGGATCCTTAACCCACTGAGCGAGGCGCGGGAT
TGAACCCGAAATCTCCTAGTTCCTAGTTGGATTCATTTCCCCTGCACCACAACGGGAACTCCTAGAACTCTTCCTTC
TATTTGCCAAAATCTCCTGTCCTATGCTGCCCTCCGGACAGATGGTGATAGTGGTGGTGGTGATGGCAGCCAGCGCT
TACTAAGTACGTTGCCCTTAGTGCTTTATTCACAACTTATTTTATCCAACAACCCTATGAAGCAGGTACTACTATCA
TCCCCATTTTTAAAGATAGGGAAACTTGCCCAAAGTCACAGAGGAGGGAAGTGGTGGCACAGGACCAACCCCAGGCA
GCCTAGCTCCAGCCTCCACTGAGAATATCTCCTCAGTCCTCAAGTACCTAAGGGAGCCCCAGGGTCTCTGCATCCAA
CGCTGTCATCTTTTCTTCAGAGGAAGTACCACAGTTTCCTCAATTCGAAAAGGTTGGTTTGTAGACATTTGTTCACT
CTCTAGCTCGTCTTGTTTTTCTTAAAATGAGTTCTTCAGAATGAGAGGGAATAACTGTTCCAGAAGTGGTTAGATCT
ATGAAGCATCCAAAGGAATGACAGCTTCTTATTCTAGGGAATCCACCTCCTCCTTTTTTTTTTTTTTTTTTTTTTTT
TTTGGCTGCACCTGCAGCATGCAGAAATTCCTGGGCCAGGGATCAAAGCCAAGCCATAGCAGTCACCTGAGCTGCTG
TAGGGACAAGACTGAATTCTTGAACCCGCTGAGCTAAGAGAGAACTCCCTAGAGAATCCTCCTTCTACTGATGGACC
TGAAGATGCAGTTCCTTTCTAAGTGGCCAAAATGGTCCTGCTGGCTCATCAAGTCTTAGAATTTAAGAGACATTCTA
ACGTTAATCCAGGCCATCATCCTGAACTTGAGGGGCTACTAAAACACTACCCATCAAAATATCAATGGTGATGACAT
AGCTCTCCAGGCCAAGTTGTTTTTTGGTTTTTTGTTTGTTTGTTGTCTTTTTTCCTTTTAGGGCCACACCTGTGGCA
TATGGAGGTTCCCAGACTAGGGGTCCAAGTGGAGCTGTAGCTGCCGGCCTACACCAAAGCCACAGCAACACCAGATC
CAAGCTGCGTCTGCAATCTACACCACAGCTTACTTCAACACCCGATCCTTAAGCCACTGAGCAAGGCCAGGGATTGA
ACCCACAACCTCGGGGTTCCTAGTCAGATTCATTTTCCGCTGCACCACCACGGGAATGCCTTCAGGCCAAGTTGTAA
GGTGGCCTTTTTGAAAGAAAGTCCAAGCGGTATCAATACCTCTTAAGTCAAAGCCATCATGCATTTTGGTAGCTGCT
TGCAGACATTTCTTTCTGTCAGAAGCGTCTCCAGCTGGAATCTCCAAGGCATCGTAGTTTCCAAAAGCAAAGAAGCA
GCGTCAAATATTTGGGGTGAATCCACTGATGAATTTGAAAACTCAGAAATGTTTAATTCATTTTGCTTTCCAGAGTT
AAAAAAAAAAGACAAAACACCCAAAAGTTTAGCCAGGCACAAATGAATCACCAGCGACTCAGTGTGTTTTGCAGCAA
AAGTCAACAACTTGAGTTGTTCCTTTAAACTCTGCAAATATTTTAGGATTGCAAAAATCAGGGTGTATTTCTCATGG
AATTCCTGTCTGAAAGTTCTCAAGGTAACTTCCATATCTGGTCATATAAATAATTTAATATTATATCTTGGTCTTAA
CATGACCTTATTATTTCTGGCTCTAGCCTACCCAGAACTGCAGAGGTATAAAAATCAGGACAATGGCAACATGGCAG
GAAGGAAGATAATTAATTAGCTGGAAGGTACTTGAAGATCTAATGACTTTAAAGACGGTATTTAAGGGCTCAGGGAT
ACAGGAAGGGTAGAATATTTTCTTTCTTTCTTTGCTTTTTAGGGCCGCAAGTGTGGGATATGGAAGTTCCCAGGCTA
GGGGTCAAACTGGAGCTGAAGCCACCAGCCTACGCCACAGCCACAGCAATGCCAGATCCGAGCTGCATCTGCAACCT
ACACCACAGGTCACGGCAATGCCGGATCCTTAAGCCAAAGAGCAAGGCCAGGGATCAAACCCACCTCCTCTTGGATC
CTAATTGGGTTTGCTGCCCCTGAGCCACAACGGCAACTCTCTGGAATGCTTTCTTTACGGTGTCAGTGAATCCTACT
TTTAATGCAAGCTGGTGACTTGGCTGATAACTAGGAGATTAGAGGAGACTTTCATCAACATCATTTCATCATGTTTC
ATAATTACCTGTTGATGTATTCCCAAAACACAACCATTACAGTTGAGACAAGCAGCATTGACAGAACCACTCTTCCT
TTGACATTCATTATTTTCTCCTGGGAAAAGAAAAGGAGAAGGGAAAATTAGATTAAATACACCCAGAGTGGAATATG
GTTTTTTAAGAAGTGCTTATACCAATATCTTTTCTAAAAGGAAAAGTTGATGAATAGTCAACGAGCGCTAAGGAGTG
CGTTCTACCTTAATTTGCATAGGCCTACACTGGCAAATTAGCCAAGTCAATGAACTGACAGGGCCGTCTGGGTTGGG
AAGGATACTAAGGCCATTTTGAGGCTCAAAGGGGAAGCATCCTGACTGATCCCAAGGTCCACCGAGATGTGGGAGAG
TGACGGGTTTAGTTAATGGTCCCTAAGGGCTCCAGCCGCCCCCAACTCAGATGCCCCACCTCGCATCACAGACTAGA
GGAAGCATCCGTTTCCTAGGTCTACTGTCCCTGATATACTGACTATGTACCTTATCCTCAAAGAAAAATATACCCTG
GTCCTTTATTTAATTTCATTTAAATTTTAGGGCCACACTCACAGCATATAGAGATTCCCAGGCTAGGGGTCGAATCA
GAGCTGTAGCCACTAGCCTATGCCACAGCCACAGCCACACTAAGTCCACGCCTTGTCTGCGAACTACACCACAACTC
ACGGACAGCAACGCCAGATCCTTAACCCACTGATTGAGGCCAGGGATCAAACCTTCGTCCTCATGGATGCTAGTCAG
ATTCATTTCAGCTGAGCCACAATGGGAACTCTCACCCTGGTCCTTTATAATCTAGGCTCTGCCACTTCCCACCCAGC
TTTTCCCCAATGCACCCACACAAGTGGCAAACAGTCGGTACATTCGTATTTCTTGATCGCTGCATGAAATTGTAGTT
GAAGAGGGAAGGGATGCTGGGTGGAATAACAGGTTGCGGAGTACTTTAATTTGGGTGGAGATAGAAAGATATTTATT
TCAAATGGAAAGGACAAGAAAAGTGTGGCAGCTAGCCACATATCAGCAATACTCATAAACAAAGAATGTAACAAAAG
ATAAAGTAGGGCATTACATAATAACAAAGGGATCAATACCAGAGGAAGACATAACATTGGTTAACATATATGCACAC
GATATCAGAGCACCTACATCTAGAACGCAAATATTAACAGACATAAAAGGAAAACTTGCACAATTACATAATACTAG
TAGAGGACTGATTCGCAACATTTTGTGGGTCTTGTGATTTTTTTCTTTTTAGGTCTATTTGTCTTTTTAGGGCCGCT
CCCGCGGCATATGGAGGTTCCCAGGCTAGGGGTCGAATCGGAGCTGTAGCCACCGGCCTACACCAGAGCCACAGCAA
CGCGGGATCCAAGCCTCATTGGCTACCTACACCACAGCTCACGGCAACACCGGATCCTTAACCCACTGAGCAAGGGC
AGGAATTGAACCTGCAACCTCATGGTTCCTAGTCGGATTCGTTTCCACTGTGCCGTGACGGGAACGCCAACATTTTG
TGTTTTAGATGTCATAGTTTACATCTTCACAGCTATCCTTCAACTATATAATTTAGTCTTTTAACATCTGTACTAGT
TTATTTAAGTGTTTGATGCAACACCTTCACTATATATTTGACTTTTCTAGTCTTATTATTTCCTTTCTGTATTTTCT
CATATCTTGTTACAGTTTTTTCTTTTTCATTTAATGAAGACACAAACATTTCTTGCAAGTCAGTGTAGTAGTTGGAA
ACTCAGTTTTTCCTTCTGGGAAACTCTTTAGTCACCCTTCAATTTGGGGAGATGACTTTAGAGCTTCCCAAGGGATG
AAGATAGGATGGGAAAGGATGACAAGGGCCGTGAGAAGGGATGAGAATATTTTGGAAACAGCATCTATACCAGGCAG
ACAAGAGAAAGAGCTGCTCGTGTTTGAAAAAAACAAAAGCAAAAAACCTGGACAAGAAAAAAATAGTGACTGACACT
GTCCCCCTTGAGTGGCTGGTGCTAGGCAGTCAGAAGGGGGGCAGAGGCAGTCAGAACCTGGAAAGGTATGGAAAGTA
GGGTGGGGAATCCCAAAAAGCATCTAAAGCTGGAGAATCCCCTGATCCAACTTCACCTAGAGAGACCCATCTGGGTG
CTGAGTGTGGAGAATGGAGAAAAGGACAAGGGCAGACCGTTCTCATGACCATAAAGAGGAGGTGGCCTGGCTCAAAG
GGTGGCTTGATTCAAAATATACTTTGGGAGTTCCCGTCGTGGCGCAGTGGTTAACGAATCCGACTAGGAACCATGAG
GTTGCGGGTTCGGTCCCTGCCCTTGCTCAGTGGGTTAAGGATCCAGCGTTGCCGTGAGCTGTGGTGTAGGTTGCAGA
CGCGGCTCGGATCCCGCGTTGCTGTGGCTCTGGCGTAGGCCGGTGGCTACAGCTCCGATTCAACTCCTAGCCTGGGA
ACCTCCATATGCCGCGGGAGCGGCCCAAGTAATAGCAACAACAACAACAACAACAACAACAAAAAAAAAAAAGACAA
AAGACAAAAAGACAAAGAAAAATAAAATATATACTTTGACAAATACCATATGATATCACTTATAACTGGAATCTAAT
ATCCAGCACAAATGACCATCTCCACAGAAAAGAAAATCATGGACTTGGAGAATAGACTTGTGGCTGCCCGACAGGAG
AGGGAGGGAGTGGGAGGGATCGGGAGCTTGGGGTTATCAGATACAACTTAGATTTACAAGGAGATCCTGCTGAGTAG
CATTGAGAACTATGTCTAGATACTCATATTGCAACGGAACAAAGGGTGGGGGGAAAATATACATGTAAGAATAACTT
GATCCCCATGCTGTACAGCGGGAAAAAATTAAAAAAAAATATATATATATATACTTTGGAGAGAGAATTGATAGGAC
GTGGTTGGTAATTTTGTTATCAGAGATGAGACAAGGAAGACCCAAGATTTCTGCTTAAGCAGGGGGGTTGTAGTATT
TTCTCAGATGGGCTGGAGGAGGAACAGGCTTGGAGGATAATAATCATGAATTCCCTTTTGGACGTGTGAATGTCGGG
GAGTGTGCGAATACCTAAAAGGGGACAGGGAGACAAGTGGACATTCAAGTCTAAAGTTCATCAGAGAGATGTAGGCA
GACCATGCAATCGGAGAAGTTGTTCATGGACCAAGGAACGTATCGGATCTGACGTGAAGGGAACGAATTTGATTACC
CAGGAGAGAATGCAGAGAGAGAAAGAGGAAGAGGAGGATGCTGGGCTGAAGCTTTAGAGGTAGGATAGAGGAGGGCC
CAGAAGGAGAGGACCAGAAGGTAGCAGAGACAGAAGAGTGGACACCTGGGAGCCAATGTCACTGCCTTTGTGAAGCC
ACTTCCCACCCCCACCCTGACCACGGCTGAAGCCCTTTTCTCTCCTCCGGCCCCCATCCCTCTATTCCTTTGCTGTA
CACATCGCCCTGGGAGTCGGCTCACCGGATAAGACCTGCATTTTGCTCTGCCTCCTCTACCTGCTTGTTTGAGCTTC
CTGAGGGCAGGAGGGATGACTTCTTCGTCACCCCTGAATTCCCAGTGCCCCACAGAGAGCAGAGAAGGCCGTCAATA
AATAATGAGTGGTTTGAGCTTCCTGAGGGCAGGAGGGATGACTTCTTGATCACCCCTGAATTCCCAGTGCCCCACAG
AGAGCAGAGAAGGCCGTCAATAAATAATGTGTGGGAGTTCCCGTTGTGGCTCTGTGGTTAACGAATCTGACTAGGAA
ACATGAGGTTGTGGGTTCCATCCCTGGCCTTGCTCAGTGGCTTAAGGATCCGGCGTTGCCGTGAGCTGTGGTGTAGG
TTGCAGACGCGGCTCAGATCCCGTGTGGCTCTGGCTCTGGCGTAGGCCTGCAGCTACGGCTCCAATTAGACCCTTAG
CCTGGGAACCTCCATATGCCGCAGGACTGGCCCAAGAAATGGCAAAAAGACAAAAAAAAAAAAAAAAAAAAAAAAAT
GACGTGTGAATGAAATGAGAATGGCACTGAGATGTGTCCTTTCAGGGGACGGGTTATTCTCCAAATATTTGCAGAGA
GGGTTCTGAGGTGACTCCAGGCTTAGATCTCAGGTGCTCCATCACCTCTGTTGTGAAATCCAGTTAAAGAAGAGAAA
GTATGGGATTATCAGCCATGTCACTCTATTCCTTCTTGCTTGGAAAGTGAGCTCTGTTTGGAAACCTCTGATTCAAT
CGCCACCTTTCGGATACAATCATGATAGGTGGTGTTCCAGAGACGGTGAGAAGATGGGGAGATGGAGCTTCTTTCCT
GTGAGCACCTCAGGTCCTGGCACAAACAGCCCGGGGCCCAGGGCAAAGTTACGAAATGCACGGGGCTACATGCAGCT
CGGCCCAGATGCTGGAAAAAGCCACTTGACTCCTACACCAACAGCATTAGCACTGAGTGCGAGGAAAGGCCTGGGTT
TGGGAGCAGACAGATCGGGGTGGAGACTGTGGCCACTGTGGCCATGCCTCTCTGCCGTTGTCTTCACTCCCAGAGAA
GTGTGGGTGGTGAGAGAGCTTGGGAAGGAGGTGGGGTCTGGAGACACCCACAGACTGGGTAACCCTGAACATGGAGC
AGTTTCTCAGACCCTCATCCAACTCCAAGCTCTGAAAACCAAAAGCCTGTTTATAATTCAGTTGGCATCCAGGCCCT
GACACGAGGCTATTTATAATCTTTATCACTTAGTGAGACTGTTTAAACATTTCTTTGCATAAATATTGATGTACATT
GTTATGTGCTGTTGCTGCACTGGAGGCGTTACATAATATAGGATAAATATTCTGCATTTGAAAAATTCTAAATTCCA
ACATATCTGGCCTTAGGCATTCAGGAAAGGGATGGTGGACCTCTAATTGATCACATTAGATGGGTCTCCTCATCTTT
AAAATGGGAATTAAAATGGTGATGACTGCAAGAGATGGTGTCCATAAAATATTTAGCATCATGCCCAGCATCATATA
AAAGCTCAAAAACTGCTAGTTTGTATTACTGGTATCCATAAAACAGGCTGTTGGGAGGATCCAGTGAAGACAGCACA
GCGCCTGGTACTTAGCAAGAGCTCAAAACGTATCGGAGGGAAAGGAATAAGCATTTTGGAATAAGAATGTGTTAAAC
AATAAAGTACAAATTGATGCAAATTAGGGCCTCTAAAGGTTTATCCATCTGTTCTATGCTGCAGACTGACTAAAAGC
TCCTGGGAAATGCCACGCAACTTTGATTTTCTTTGATCAAGCCCAGGCCATCCAAAGCCTTGTCATCCCCACCTGCT
GAGGATCAAACCCTGTGTAAGAAATGCGAAAGAGAGAAACACAAACTCCTGGCAGAGAACGGATCAGGGAGAAGCTG
GTATAAAATCAGACACACCTCCTAATCCTTTCTCCAAAGGCAAGTGTTTTTCTGTTTGTTTTGGTTTCAGGGTTTGT
TTGGGTTTTTTTGTTTTTTGGTTTCTTTTGGTCTTTTTAAGGCCACACTGGGAGTTCCCCTCCTAGCTCAGAGGTTA
ACAAACCTGACTTGTATCTGTGACCATTCAGGTTCGATCCCTGGACCCGCTCAATGGGTTAAGGATCCAGTGTTGCC
ATGGCTGTGGTGTAGGTCGCAGATGCGGCTTGGATCCAGCATTGCTGTTGCTGTGGCGTAGGCTGGTAACTACAGCT
CTGATTCAACCCCTAGCCTGGGAACCTCCATATGCCAAGCATGTGGCACTTAAAAGATTAAAAAAAAAAAAAATTAA
GGCCACACCCAAGGCATATGGAAGTTCCCAGGTTAGAGGTCAAACTGGAGCTATAGCTTCTGGCCTATGCCACAGCC
ACAGCAACGCCAGATTCAAGCTGAGTCTGTGACCTCCACCACAACTCATCACAACATCAGATCCTTAATCCGCTGAG
TAGGGCCAGGGATTGAACCCTTGTCCTCACGGATACTAGTAGGGCTCATTACCACTGAGCCACAATGGGAACTCCTT
TGTTTCATTTGTTTTTGATTTTTTTTTTTTTTTTTTTTTGGTCTTTTCTAGGGCCGCATCCACGGCTTATGGAGGTT
CCCAGGCAACGCCGCATCCTTAACTCACTGAACGAGGCCAGGGATCAAACCCGCCACATCACGGTTCCTAGTCGGAT
TCGTTAACCACTGAGCCATGACAGGAACTCCTGTTTTTTTAATTTCAGAAATTAGCATCAGAGACAACTCTTGAAGC
CCCCCCCCCCTTTTCTTTTCCTCTGGACCGTAAACATGGCTTGAATCTGCTTACTTTTCGCTGTGGCCAGGCATCAC
TCTTAGAGACTTACAGTTGGAAGCCACCCAAATGAGCCAATATTGCCTCCTTTTGAAAAGCACTGGGAAGGGGTATA
TGCAAGCTTTCTGGAATCTGGAACCCTAGTGTCTCAGGAAAGAAGGGTTGCCAGAATGGCCAAAGGGTTTTTAAAAC
ATTTTTTTTTTTTCTCTGGATTAAAATGAGGCATTTGGCAGCCCATGTGGTCTAAAGCCCTTCACGGATGTGTTTGT
CACAGAATTTTCTAACTCTCTAATTCTCAAGATTGGTGGTTGACTATCTTACCCACCAAATAGGAAAAGTGGGGGTT
GCTTCTACATTTCTCATGGAAGAGGGAGAGCACAGGATTAGAGCCTAGAGAGCACTAGCACCCTGTCTTATAAGGGA
GAGTGTAACCACCTCAGCACCACCTGGGCCCCAGCCCTCAGAGGATCAGGTGAACCCAGCGGGCCCAGTTCCACCTG
AGCCCTCCCACCATCCCACAGGCCCTCCTGCCAAGGCGTTTGCCATTTCTCTCTGCTCCTGGGCCACTCCCACAACT
CAGCCCCTGCAGCGGTTTCCAAAAGAAACCACTTGCACCCCCACTCCCGGGCCTCGTGCAGACTGTGCTAAAACCCA
GTGCATTTCCCAAGGCAGGGCCACGCTGGAAAGCCTGTCATTTCTCCACCTTCCTCCTCCTCCTCCTCCTCCTCTTC
GGCTTCTCCATCCCTGGGGTATCAGACTCTTCCCCAAGGCCCATAAATTAATCCTTCCTGACCCACCCCTAACTTGT
CCCACACAGAACGGTACACACACCCCCTCCACTTCAGAGAAGCTCATGGTTTCACCGCAACTGGTCCAAGTCAAGGT
TTTCCTTCCAGACAGAGTTCCACTCTGAAAGGAATTCTAGTGGCCCTGTTTTTCTCCACCTCGTGTCAGGGGGAAAG
GTGAGCACCTCAGCTGAATCACAGAGCTCTCAGAAGCCCTGGAAAAGCCATTATCTTGAGAGAGCAGCGAGCAAGCA
GTGACAGAGGAAACCAAAGCTTCCAGCAGACTAAAGAATCTTCCTCTCTGCCTGTGACTCTTGCCCTGCCCCTGGAA
CCCATCCTGCCCTGCTAGCTCCACAGGACCCTGGCAAGGGTCAAGAAAGTCAGGTAGTGATAAGTGCAGCAAATGAA
ACACAGTGCGGGGGAGGGAGCCAAGGTGGGGAAGCCGCAGGAACTGACTGGGTGTTACTCACCCTGGACAAAAACCT
CCTATTTTTAGGCCTAACATTTAGATCCAGCATTCCAGGCAGAAATTAGGCCGGTGCTGGGACTGGAATCTGCAGCC
CTACATGCACTTGCCCTGGGCAAGTCCTCTGGCTCTGAGCCTCTACTTACACAGACCAAACGGAGCTTCAAACACCC
TCCTCCAGGGCTCTTGAAAGGACAAAAGGAGACCCCGTCTATGAAGCATGTTGTGCCTGATGCTCAGTAAATGCTCC
ACAAATGCAGCCAGAACAAGGGCGATGCTTTTTACGGGGAGAGATTCAGAAATGTGTGGCTCTGACGGCCGAGCTGT
GGCTCTGTCTGAGAGGAGTCTGGGCCCTCCAGGGCAGCACCACACAGAAGGGTCCAGGGCGAGCCCCCCACGCTGTT
GTGACTGTTGTTGGGGCCAGCTCAGGGTCCCCAAGCGCATCTCGTTTGCCTCTATCGCCTGGCGCGCATGTTGGGCA
GGGAAGGAAAGTCAGGCTCCAGGGTCACCCCAGCACCCACACAGAGCGGGTTTGTGAACCACACGCAGCTTTCTCTG
GCCTCAGTCTCCCCGTCCTTTGAAACATGTCCTGTGGGCTTAACTTCCCTGAATGAGCCAAGACCTGTATGAGAAGG
CAGCCACAGAGCTGGAAGGCTCCTTTTATGAGGACAGGTTCACTGGAGCTCAACTTGCTGCAGTGGCCACAGATTCC
TAGAAGTGGTGATCAAAAGATAGGATTGCCAGAGTTTCCGTCATGACGCAACGGAAATGAATCTGACTAGGAACCAT
GAGGTTGCGGGTTCGATCCCTGGCCTCGCTCAGTGGGTTAAGGATCCGGCATTGCCATGAGCTGTGGTGTAGGTCAC
AGACGCGGCTTGGATCCTGTGTTGCTGTGGCTGTGGTGTAGGCTGGCAGCTGTAGCTCCGATTTGACCCCTAGCCAG
GAAACTTCTATATGCAGCGGGTACGGCCCTAAAAAGCAAAAAATAAAAAAATAAAAATAAAAAAAGAGATAGGATTG
CCCACAAAATGTGTTGAGCCCTCAGGCCACTTCACCCAGAAGCCTCCGGGTCAGGCCCCCAGGCAGGCCTGGGGTGT
GGAGTGGGCAAGGCCCAAATGCTTCCTCCAGGTGAGGTGCTGCCCCTGCCTGGGGGAATCGTTCCAGCCTGGGTGCC
TGTCCTGGGGCTGCAGGTGGAGCCCAGGTACTGACCCTGCTCCCCGCACCTACCTGGGTCCTAGGAGCAACCTGCCC
CATCCAGGTAGACCTTGCTGAGCTCCTTGGAGCCTCTCACTTTGATCCCAAGGAGAAGGAGCTGAACATGATGCTAC
TTGGCTCCCTGCTCACAGGTCACGATCCAGACCTCACAATCACCTGGTGGTGCACCCCCCACTCCAGCCAGGATCAA
AGAGCTGAATTCTCCAGGACTCTGGCTGGACCCACCTGAGCAAGAAACTGCCAAAAGATGGGGCGTTTGAAGGACCT
GGAGCACCTACACACCCCAAGCTTTCCTCATGGTTTCAGTTACAAGATCTGTGTTTGGAGACCTCCCCTTGGGGGCA
GGGACCATGGAAAAGTTCCAGCTGCAAGCAGACCAGCTGGGAGTGGAAATCATCTCCTCGGGCTGCACCATCACGGC
CCTGGAGGTCAAAGACAGGCAAGGCAGAGCCTCAGATGTGGTGCTTGGCTTTGCTGAATTGGAAGGGTACCTCCAAA
AGCATCCCTACTTTGGAGCAGTGGTTGGCAGGGTGGCAAAGCAAATTGCCAAAGGAACATCACGTTGGATGGGAAGG
AGTATAAGCTGGCCAACAGCCTGCACAGAGGAGTCAGAGGATTTGATAAGGTCCTCTGGACCCCTTGGGTGCTCTCA
AATGGCATCAAGTTCTCGAGGGTCAGTCCAGATGGTGAGTTAAAAGTCTGGGTGACATACACGCTAGATGGCAGGGA
GCTCATGGTCAACTCTCAAGCACAGGCCAGTCGGACCGCCCCAGTCAATCTGACCAGCCATTCTTATTTCAACCTCG
TGGGCCAGGGTTCCCCGAATATATATGACCATGAAGTCACTATAGAAGCTGATGCTTTTTTGCCTGCAGATGAAAAC
CTAATCCCTACAGGAGAAGTTGCTCCAATGCAAGGAGCTGCATTTGATCTGAGGAAACCAGCAGAGCTTGGAAAACA
CCTGCAGGAGTTCCACATCAATGGCTTTGACCACACGTTCCGTCTGAAGGGATCTAAAGAAAAGCAATTTCGTGTAC
GGGTCCATCATGCTGGAAGCGGGAGGGTACTGGAAGTGTATACCACCCAGCCTGGGATCCAGTTTTACACGGGCAAC
TTCCTGGGTGGCACGCTGAAAGGCCAGACTGGAGCAGTCTGTCCCAAGCACTCTGGTTTCTGCCTCGAGACCCAGAA
CTGGCCCGATACAGTCAATCAGCCCCACTTCCCGTCTGTGAGTTCAAACACACCCCTTGGTTCTAGTTTTCTGTGGC
CTAAGGAAATGTAAAGATATGACCTGTTCCAGGGTCAGGCTGGAAGCCCCTTCAGGAACCTGTCTCCTACGCAGAGA
TAAGATGAAGATTTAGAGGTTTTAAAAGTGATCCTGTGTATTACTCAGCCATTAAAAGGAAAGAAAGAACGGCATTT
TTAGCAACAGGGATGGACCTAGAAATTATCATGCTAAGTGAAGTCAGTCAGACAATGAGACACCAACATCAAATGCT
ATCACTTACATGTGGAATCTGAAAAAAGGACACAATGAACTTCTTTGCAGAACAGATACTGACTCAGAGACTTTGAA
AAACGTATGCTTTCCAAATGAGACAGGTTGAGGGGTGGGGGGATGCACTGGGGTTTTGGGATGATCATGCTATAAAA
TTGCATTGGGATGACTGTTGTACATCTATAAATGTAGTAAAACTCATTAAGTAATAAAGAAAAGAATGTAAAAAAAT
TAAGAAACAGAAAAAAAAGTGATCCTGTGAATTAAAATTACACAAATGGTAGTTGTCATGATAATCTGAATATTGAT
TTCTTTCACAATGACTGGCTCCAGGCCAAGTCTAATGGTCAGCTCTATTCTCTGTGTAGTGAAAAAGACCCAACCAT
CAATGTCATCTTCTAAGCCCTGACCCTAATCCAGAAGTGGTACCCAGATCCTTGTGTTGGCTCTGTCTCTCCACTCT
GCTTCTTTTCACTCCTTCTTTCTTTGATCCTACTCATTCCTTTTTCCCTTCCTCTTCTACCTCATACCACCTTGATC
TGTGCAGCACTTTGGAGTTTTCAGAGGTCACTGAGCTCATTCAACCTGGTGGTAGAGGGACCTCTCTGCCTCAGTAA
AAGAATAGATGATGAAGTGAGCCACCTGAGAATTAGGGGAGGTAAATGACCCACCTAAAGGCGCACAGCCAGGAAAA
ATTTAGCCTGGATTCAAGATCAGGTCATGCAAATTCAAGTCCTTCTTTGCCTCCACTTCAGTCTTCCAGAGCATTCC
TGGAGTCATTAATGGGAAAAGGGGGGGTCTGACCCTTACTCTGTTAAAGCCAGACCTTCTTTCCAGATATCACTTTT
ATAAGAAGCCCTAGTCAGAGTTTAAATGTATCTCTGAGCCTTATAAATAGTGTGACTTAAAATACAAGATCTAAATA
TCCAGAAAAAAAAAATCTGTGAATTTGATTCTCCGCCTTTGGGGTTACTAAGAAAGCCCAGCCTAGCCAAGACATGG
GAAGGAAGCCGCTGGAGACAAGAGCTGTGTGAGTTCGAGGAGAGGGCCTTGCTGGGACTGCACGCTGCACCGAGAGC
AGACTGTATTTGGTATACGAGGCGGAGTTCCCTCCTCTCCTAAACAATTGAATCACGAGTGATGGGTTTGTGTTGAT
GGTTTTTAAAGAAATGTTATCTTATACTCCTCTACACTAATAATCAGTTGAAATAAAACCAAAATGTGCACCCTCAG
AAAAAAAAAAAAAGAATAAAAAGAAACTGCCAAAAGACTGACAGCACTAATAACAAGTTATGAAGCTGAAAGAAGCT
TCTCAAAACTCCCAGGAATAAAAAGCAACCACTGATTAACCATGCTAGAGGCAGAACTGATTTGTCTTCCTTTTTGT
CTCTCTTAAAAATGATACTACAGGAGTTCCCGTCATGGCACAGCGGAAACAAATCCAACTAGGAACCATGAGGTTGC
GAGTTCAATCCCTAGCCTCGCTCAGTGGGTTAAGGAGCCAGGGTTGCTGTGATCTATGGTAGGTCACAGACACAGCT
CAGATCTGGCGTTGCTATGGCTGTGGCGTAGGCTGGCAGCTACAGGTCTGATTAGACCCCTAGCCTGGGAACCTCCA
TATGCCATGGGTGTGGTCCTAAAAAGACAAAAAGAAATAAAAATGATACTACAAAAATCATCAGATAAAGAGATAGT
TCAAAGTATGCAGCCAAAATATGAGAGGTACATCAGACAGCTGAGTAATACTAATTATTTTTATATTATTTTCACGT
GTTATGGTTGTTTTTCTGAATTTGGTCCTATTTAGAGTATTGGTCAGTCTGTGTTAGCTGTTGGGATGGCACCTCAT
ATTCTAAATGCAGTCAGCCTTCTGTATCCATGGGTCTTACATCCACAAATTCAACTAACCACGGATGGAAAATACTC
CAAAACATCACATTCCAGAAAGTTCCAAAAAGCAAAACTTAAATTTGCTGCATACAGGCAACTATTTGCGTGGCATT
TACATTGTATTAGGAATTATAAGTAATTGCAAGGTGATTTAAAGTATATGGGAGGGGAGTTCCTCCGTGGGCTAGCT
GGTTAAGGATCCAGTGTTGTCACTGCTGTGGCAAGGGTTCGATCCCTGGCCCATCAACTTCTGTATGCCATGGGCAC
CGCCAAAAAATAAATAAATAAAATATATGGGAGGCTGTGGGTTATGTGCAAATACGATGCCCTTTTGTGTAAAGGAC
TTGAGCGTCCTGGGATCTGGTATCCGTGGGGTCCTGGAACCAATCCCCTGTGGATACCCAAAGACGACTGCATTCAA
TCCCCAGCCAAATCATGTGTCTGCAAATTTGTGTTCCCTTTTCTTAAAGCAGGCCCTCGATATTGAATAAGCTTCCT
GCAGCACTTGGATGCCCCCCAGCTGAACCAGACCAGGCCTCAGGCTAAACGCTTTACCAGAGGTTTCTCAGATAAGT
CTCACAACGTCCTGTGAAGTCATTCTAGTGTTATCTCCACTTTACAGACATGCAAATGGAAGCTCAGAAAGGTGAAG
TGACTTGCCCAGTGTGTCACACAGCATAAAGTGATGGAGCTGATATTCAGGTCCAGAGAGCTGGCCTCAGGGCCCAC
CCTTTTAACTATTCTCAGTAAACATGAAGACTCACCCATGGACTAATCACCCAGGGATCTTTGGCACATCCTCTCAT
TTTGCCTTTCACGATGATCACTTAGCAATTGACCCAAAGCTAGCCAATCATGGGCTAGACTCAGCAGGGGCCAGCTT
CTCCTCGGCCCAGCTGGCGAGCATTGGCTCAACTCCTCTGCCATTTCCAGGAGCCTCCTGCGTGCCTGGTGTGAGCC
TTCCCCATGCACGCCATCCTATTCACCCCTCATCATGGTCAGTGCGGGGGCTTTTTAGCTGAGGAGACCGAGCTTTA
GCAAAAGCTGAGATCGCTGGGCTCCCCCACAAGGGGGGCGCTGAGTTTGAAAAGCAGACCCTCTGCCTCCCAGGCCC
AGCTCTTGGCCGGGGGATGGTGCTGGGGGGAAGGAGGGAGAGTCCTGCTTTATCTAAAACCTCTTTAAATTGGCTTG
CATTACAGGGAAATGCTCCCTGTTGGAAGAAACATGGTATAATTTGGGGGGCAGGGGTGGGGGGGGAGTAGTGCACG
GAAGGCTGTTTCCAGTTATGTTTTTCATTATAAGGGTCAAAGCAAACACAGACGCAGGAAGCTAAGAGACAAGCCTC
AGACTAAACATACGACCAGCTGTCGCTCCAGCCATCACAGACCTGTTCTCGGAGGGACATCTTGTAGGCCCCTTTCT
TGAATCCCCTTCAAAAATCTGAAGCCTGGATCCAGCCAGCTTCTCCTTGCTGCCTGGCTCAGAAATCATGGTGCAAG
AGTTTTTCCAAGAGAAATAGGGCGAGGTACATGAAGGATCGGTGCTGCCCTGAGAGGGCACTATGTCCGCCCCCAGC
ACAGGTCCCGGGCCTGAGACTCGTCCTCCTGGCCCCACAATGGCACTGTGTGGCCCACACAGAGAACCCCAGGCTGT
AGCCACACCCCGTGAGGTCCTGCCGGGCAGCCAACGAAAGCAGAACCAACAGTGACTGAGCCAGCATCCTGCCAGCT
CCCACTCCTAGATCCGATGCCGGGGACTGGAGGACTTTGTCTTCTTTCAGAACAACTGGGGGGAGCAGCAAGAAGTC
AGGGGGAGAGGGGGGCTCCTCTCTCCACGCTGCAGCCAGCTCATGATACCCACCCCCCCGGTGACCCCAGCAAAGCG
GAGGCAAATCATTTCAACGTTTCACGTACCTCATCCTCTGCTTCTCTCCCCCCAGAGTAAAAGGCGAAGCAAGTTCT
AGTGAGCTCTGCTCTGCAGAAGGAGGCAGGGCTGGGAGGAAGGGAAGGTGCTGCGTTCCAACTCCTGTCAAAAGAAT
AAACAGCGGTTTCACGAAGAGGAGCGCAGACGGATCCCACAGCAGCCAGGGGCCTTGTTCCTCCTTGCTCGCCCTGG
GAAGTGGGCTGTTTATCAGGCCTGTTGACTCAGAGCTGCATGCCAAGGCAGAGACGTCTCTCTCCGGCCCAGGATCG
GCCCGGCCTCCTTCACTAAGCGAAACTACAGGTCCAAACTAGGCCTGGTGGTGGAGGAGGGACAGCCACCACCCTTG
GGAGAGACACACAGGCCGCCCACATCACCCACTCCTCGGCGAAAATGAGAACCATTCTGAACCCAAACCACCCCAAA
TGACAACTAGCAGGGACAGCCAATGGAGAATTTAAAAAGAAGGGGGCAGAAAATGGAGAGGGGTGGCTAAAGGAGAG
CATCCTCAAAACTCCCGTTGAAATGCTACCTTCCGAGCCTCTTGTTCGCATCCTTTAGGCTTCAGAAGTTGTTCTGT
TTGAACACTATTTTTATAGAATGTTCTGAGATCTCCTGCATGGCAAGCCAAGCTATAAGAACTTCAAAAGGTCACTG
AGGCCCAACCCAACTCTTTGGCTGAATAATGCTTAACCCTCCCCACACCCACCTCCTGCTCCCAAAATAGAATTTCC
TAGCTGGAAGAGACCTCACAGCAGTGGATTTGTAAATGTCGCAACAGCTAAAGCTTTAAAAAAAAAAAAAAAAAAAA
TGAAGTCATTCTCAGAACCCCACTATGTAAAACAGAGGACACAGGGGGCTTTGGCTGAAGGAGGGAAATGAAGTAAG
TAGGGGCTCAGAGCCCCCCCACCCATTCTTCCCAAGTGGCCCCAGACACTTCCTGGGAGTAGAGCCTAGAAACCCCA
GACTAAGGAGAAGGGGCCGAAACCTGACAGAAAGGAGCCAAGAACTGCCCCCTCAGCTTCCAGCGGATGGATGCCTA
ATTTAGCTTCTCACTCCTGTTCTGGGGAAGAAATTCACCGCCCCCTCCTCTGGGGCATGAGCTAGTTGACCACAGTC
TTCAAGATCTGCTTAATAAACTACTGAAATCCTCCCTGCTGGCATCTACTAAAGCTGAACCAACCACACCTCATGTT
CCAGTCATTCCGCCCCAGATTAATACCTGAAAGCAAGTGCATTTAAGTTCAAACAGAGACGTGACCTGGGACCAAAA
GCTGGAAAAACCCCAAGGCCCATCATCAGCCAGATCAGGTGTGGTCCAGGTGAGGGTCACACACATCCGTGAGAAGG
AACCAGCCACAGCTGCTGACATCAACAGGGTAAATCTCACACATGGTACTGAGTCAAAGCAGCCCTGGATGCTTGCA
TTTATTTAACGTTCAAAAATAGACAAAACCGGGAGTTCCCGTCGTGGCGCAGTGGTTAACGAATCCGACTAAGAACC
ATGAGGTTGCGGGTTCGGTCCCTGGCCTTGCTCAGTGGGTTAAGGGATCTGGCGTTGCCGTGAGCTGTGGTGTAGGT
TGCAGACTCGGCTCGGATCCCACGTTGCTGTGGCTCTGGCGTAGGCTGGTGGCTACAGCTCCGATTCGACCCCTAGC
CTGGGAACCTCCATATGCCGCAAGAGCGGCCCAAGAAATGGCAAAGCCAAAAAAAAAAAAAAAAAAAAATAGACAAA
CCCAGGGAGTTCCCATGGTGGCTCAGCAGAAACAAATCTGACCAGTATCTACGAGAATGCAAGTTCGATCCCTGGCC
TCACTCAGTGGGTTAAGGATCCAGTATTGCCACCAGCTGTGGTGTAGGTTGCAGATGCGGCTCGGATCCCATGTTGC
TGTGGCTGTGGTGTAGGCCAACAGCCACAGCTCCAATTGGACCCCTAGCCTGGGAACTTCCATATGCCCCAAGTGTA
GCCCTAAAAAGACAAAAAAAAAAAAAAAAAAGACAAAACCAATCTGTGGTGCCAGAAGTCAGAGTGGGAGTGGTAGA
GACTGGGAAGGGGAGGCTCAGAGAGCTGCTGGGGGAGGGGGGGGGCTTGTCATGTTGTTTCTCGAGCCAGGTAGTGG
TTATGCAGGTGTGTCCACCTTGGGAAAATGCCTCACAAACATTCCCTTTCAGTGTGTGTGTTAAAAACAAAGATGCA
CAGAAATCTTCCTGCTGGAAGCTGCCTTCTCTTGGGAATTCTGACTTCCCCTGAGTCTACAGGGTCTCAGGGCCACA
GGGTCATGGATAGACCCCGTTTTTTCCTTCTCTTGGGTTCAACGCCCCAATACCAAGCACCACAGAGCACCTAAGTA
CGGACTCAGGGAAGATCTTTCACATTAAATGATGCAGGCAGCTGGACTGTGGTCAACTGGGAGGGAAAGTTCACAGC
ATTTGGAGGCTCAGGAACTGGGCTAAGATAAACTGGTCCTTTCAAGAAGCAAGCACCCAGGAGTTCCCATCGTGGCT
CAGTGGTTAACAAATCTGACTAGGAACCATGAGGTTGCGGGTCCAATCCCTGGCCTCGCTCAGTGGGTTAAGGATCC
AGTGTTGCCGTGAACTGCGGTGTAGGTTGCAGACGCGGCTCAGATCCCACGTTGCTGTGGCTCTGGCGTAGGCTGGC
AGCTACAGCTCCAACTTGACCCCTAGCCTGCTGGGAACCTCCATATGCTGCAGGAGCGGCCCTAGAAAAGGCAAAAA
GACAAAAAAACAAAACAACAACAACAAAAAAAAGCAAGCACCCATCATGGTTGCCACCTTCCAGTTTACAAAGCAGC
CTCTCTCCTTTAACTCAGCAAATCCTCAGGCTCACCCGCCCCGGGTCAGGGAAGGGAGGGAGGCACTGGGAGCCTCT
GTGACTTGCTCAAAGTTGCCGGCTGGTGGGTCTGATGCTGCCCTTCCTCCTGAGCTGCCTCTGGGGAACACCCTACA
GGTTCGTGGAATTAGAGGCTCCAGGCTCATGAATCAGAGCACGACAGAGTATGCAAACTTGGAAGGCAGAAAATTCA
ACTTCCAGAGGATCCGACATGACCTTCCTCCTTCTCCGACATACCCTGATGCCCAGACTCTCAAAACAAGGAAGCAT
GTACTTCCGGTCATTCCTTCATGGAGAGGCAGGGAACTGTAGCAAGTGAGCCTCAGGTCTGCTGATCAAAGGAGGCC
AGTGGCCATCCAGGTAGGAGTTTGGCACGTTTCCCAGCCCAGCCAGGCCGACTAATCTCATCACTCAATGTTCCCCA
AGGCCCCTTCCAGCCCTAACAGTCCATAGGCCTGTCAGATGACAGCCAGCATTCAGAGCCTGTCCATCTGCCATGTC
CCCTGCAGAGGAGTGCAGGGCCTTGGAGCTGCGGCTCAGCAGCTGCAGCCCAGGTGTGAAGGGTCCCGGCTTCATGC
CCCAGACCCCTTCCACCTGAGAAACACAAAGGTCCGGATTCCCACCCTGTGGGAGAGGGAGAATTAAGTGTTCTTGG
CAAAAAGTGCTACAGATACAAAGATTGCAGCTGTCACTTTTAATCCTAAATACGTTTAGGGCAGGTATAAGACATTC
TTGCTGTCACTTGTGAGTGATGGAGCAGTTTAGTTGGTTTCCTCTTCCGTGTGGTGAGGATAATTATAATCCCCACC
GCTCGGGGTGGGTGAGGGGCCTAGAGCACCGTGGTTATGAATGTGGACTCTGGGCCCAGGCTGCCGGAGTTCGAGTC
CCAGGCCTGCCCATGTGCGATCCTGGGCAATGTGCTTAACCTCTCTGTGTCTCTGTTTCTATGGCTGCACAATGGGA
ACAACAGCAGCTGGATGGTAGCTGGCACATGGTAAGTGTCTAGAGATACGTATTACCCGATATTGCAAGAATTAAGG
AGACACGCCCGGAAAAGTGCTTGAGGTGCTCAATCATTGTCCGTCTCTGCTGTTCTATTAATCCGAGGCTGCAGCTC
CTTGGAGTTTACATTTGTGTATCAAATAGTCATTTTGACCACGTAACCCTGCAGGTGGGGAAAGGTACGGAGGGAAG
GGTTCCTGGCACGACGTTTCCGTTACTGTTAAGTACTGCCCCCCACACACGCCTGTGAGTATCAGAGCTGAAACGAT
CTTGGCAAAAGCCCACATAATAAATAACGGCAGTCAAGAGAGGTTGCATCTATAAGTCTATTTCCTTGAGAAGAGCT
GGAAAAATGAAATCATGATGACTCTTCCCAGGCCAGTACATTGCTAATCATCTTGAGATCTGCCTCTGCCCCAGGTA
ACTCCAGGACAGACTCCACCAAAGCCATGCTGAAGCACTCCTGCCTCTGCAAGCATCCATCCTGAGCCTCAGCCCTC
CTCCTGCACACCAGGAAGTCCCTCTCTGGGGCTCATGTCAGTCCTTCAAGCTCTATAGGTCAGACTCTTCCTAGAGA
AGAAAGAAGCTGGCTTTGTTGACAGCTGGGGAGATGTGAGGCGCTCCCACGGAAGGGCGAGGCCCGGGTACTGATGA
CACCCTGGGCTTGAGCACCAGCACAGGTGGCTGGAGGATTTCCCCACCCAAGGAAACCGCTCTATTCCTACCCTCTC
TTGGTCCTTCTCACCCCTTCCTCAGGCCAAGGACCCCAGATGGAGGTGAGAAAGAAGCACCTGCTCCTTATTCACAA
TTGGGCAGTAGGTGCCAGGGGGTACCCTTGCCCCCGACCCCCCACAGAAGTTCTCACTCTTTCCTCAGTAGAGAGAA
CCTCAAAGTCAGGTAAGTCAGCTCCCTGCCTCAAAGCAGGACTGCTTTTTGAACACGTGATAAGCTCATCTTCCGTC
AAGGTCACACCCACGCCCCGTTTAGAGCCCACTGCCATCCACAAAAGCCACATAACATAGAGGCTAAGTAGGAGAAA
TATTACAAGCCCAAGTTATAAGAAAGGGAACTGAAGATCAGGGAAGAAACTTACAGAGTCGTATGGTCTGAGTCAGC
AGCCCTGGAATGGAAGACAAGTTTGGGGTCTTTCTGTGAGTCTGTCCCACCTCAGCCTCGTACACCCCTGGTGGTGG
TGAAGCCAGACCAAGCTGGGGATGCTAACGGAAGCAGAACAAGAAGAGGGTCATGAACCAGATTCCACTAGAACCCA
AGTTCTTTGGGGGGTGGGAGGGAGCACTTGTCTTCTGTCTTGGTCACTTCTGGGCTTTCCTGGTACCTGGAACAGTA
TTTGACATCTATCAGACGTTCAGTAGATATTTGCTGAATTAATGCTGAGTGAAAGCCTACAGGAGCCAGGCAGGCAG
CAGAAGTATGTGAATTTGACCAGGTAAGGATGGACTGTGATAAACTAGCCAAATCAGATCAAAATCAGATTTTAAAA
AGAAAACAGGTTTCCCATTGTGGCTTAGCAGAAACGAATCTGACTAGTATCCATGAGGTCTTGGGTTCGATCCCTGG
CCTCGCTCAGTGGGTTAAGGATCCAGTATTGCCACCAGCTGTGGTGTAGGTCACAGACACGTCTTGGATCTGGTGTT
GCTGTGGCTGTGGCTGTGGTGTAGGCCGCAGCTACAGCTCCAATTCAACCCCTAGCCTGGGAACCTCCATATGCCAT
GGGTACGGTCCTTAAAAGACATAAATAAATAAATGAAAAAAGAAGTACCCTTCTTTGATTACAGAATGTGATATACT
GGCCATAGATGACTCCTCTTTTAAGGGAAATTGTTTTGTGCCAGAAGCGAAAAGTATTGTTTGAACCCTTGCTCCCC
AACCTAGGGGATGTAGGCGTGTCTGTCCCTTCTCTGTGCGTCTGTTTTCTCATCTGTGAAGTGCAAGGTCCCTCCCA
TTTCCACTCCATCCTGCCTGGGCCTGAGTCTGAGGGTAGAGTTGTGAACTGGGCTCCTATAGCAGTCTGACTGGGGG
ACTCAGAAGGCTTCATGGAGGAGGGGATGTGACCAGACCTTTCCAGATGGGCTTCCCCTGCCTCCCAGGGATCTGGC
ATATCAGCCTGCACAGCCACTCACCCTTCTCTTCCTTCTCACTGAAGACAGGCTGAAAAACTAACCTGCCGGGGGAG
GCAGGCAGCCCCACACTTCAGAATTTATAAATCCTCCTCTGCTCAGGCTCAGGCCCAGTCCATCCTGGGAGGTGCTG
GAGGTCATTTTATGAACCAACCACCTTCGGCTTTCGGGGCGTAGGGATGGGGCAGGATGCCACAGAATCACCAGCCC
ACTCACGAGCCCCCCTGAACCCTTCCCAGGGTGACAGAAAAGAGGAAATGGAGCACAATTCCGGCCCCAAGACAAAG
AAACTCGGCCAAGCAAAGAGAAGGGAAACAGCTTCCTGAGTCAGGGGACTTGGAATCTGCTAGGGCCACAGGGAACC
TTCCCCCCATCATGGTGAGGCTGAGGTGTGGACTCAAGCAACTGAGAAGATAAGGACAGGTGGGTCCGCCCCCACCC
AGCTCAGCCCAGAAGCATTTCTTTCCAAAGCGCCCGTGGAAAGGAGTGGTTTGCAGTGAAGAACATTTTTCAAAAAA
ATCGAAGTCTAATACTAATAATATAACCAGATAAAAGAAAGGCCAAGAAAGTGCCATATAAATCCAAAGACACGGTT
CCACAGGCCACGTGGCCACAGGCACATTTTTCCCCTCCTGGGCCTCACGCCCCGTGTGGGCACTGACGGAGTCGAAG
TGGAACATTCCCAGGACCCACCTGGGCTCGGTGGCTGTGAAGAGCCTGTTGTTACTTGCTCTGCAAACCTGGCTGAT
GAACATGCAGCCTTCAGAGCGCAAGGTCACCTCCTCCAAGATCTGCCTCCTGGCACAAGTGGATTCTCACAGCCCTG
GTGTGGCCTGCTGGTTTCACGGCACCTAGAGCGCAGGTTCTTGGACATATGTCCATCTCACTCTCTGCACGCACATT
CTCAAGGGCAGCAGGGAAGTCTGCTTTAGGTCAAGGTCCCTGGTGGTCCTCACCACAGGGTCTGGTAGAGAGGAGGT
CTTGAGGATCAGTAGGCTGGTGACAGATGGACAGATGGACTTGCTGGGGCTACTGTAATAAAGCACCACAAAGTGGG
TGGCTTAACACAGCAGAAGTTTATCCTCTTATACTTCTGGAGGCCAGAAGTCCAAAGTCAAGGTGTTAGCAGAGCTG
GTTCCTTCTGAAGGTCATGAAAAGGAATTCTACAGGCTTCTCTCCTGGCTTCTGGTGGTTGCCAGCCACCCTTGGCA
TTCCTTGGGGCAGCATAACCCAACACCGTCTGCATCATCACACAGTGTTCTCCGTGTGTGTCAGCCTCCAAATTTCC
CTCTCTTTAGAAGGACAACAGTCACTGGATTGGAGCCCACCCGAATCCAGCATGACCTCATCTTAATTTGAGTCATC
TGACAAGAATCTATTTCCAAAAAAACTCATATTCATAAGCACTGGGGATTCGGACGTGAACCCATTTTTTTTTTTTG
GAAGACACAATTCTACCCACTAGAGACCGTTTCCCAAATGCCTATTGGCTGGGAGCGTGTAAACACTAGCAGAACCA
CCTGTGAGGGTGGAAACGCTGCATATAATTACGGAGTTGAAAGCGAAAGTTTGGAGGCAGGCGGGGAGGTAGGGGTG
GTCTTGAGAAAGAGGAAAACATCTTAGAGCATCTCTACTTGGCCAGGATTATAGGAAGAAGAGAAATGCCTCCCCGG
GACAGGCATCTGTGGGATGTCCCGCCGAAATGCTGCCGGTCTGTCAATACTCAGCTCTGGGCATCACAGAGCCATGA
ATGGGTAAGCTTCCTCCCAAGAGGAGCAGGATGTGAAAGAAGAGGGGGCCCTGGGGCAGCTGGAACCAAGAACCTAT
GGAAGCACAGAGCTGGGCACCAGATTGCAGTGGGTCAAGGAATGAAGGTCAGGTGAGAAAGTGACGTGCAAGGACCT
CTCGCCAGCAGCTTGCCTTGGGAAGGGCTGGAGGGAGGGTGCCAGCTAGAGACACATGGAGCAAAAAGGAAATACCC
TTGAGTACACTGCTGATAATGAAAAGCCCTTAATGAGACAGAGCCGAGGAGAGGAGGGTTTGAAGATTCAGAGGAGG
GAGAGGATGGGGGCTGAAGAGCATCTCTTGGCGGGGAGATGGGGGTGCCACCAAGACAGGCTGAAAGTGCTCCCCCT
TTTTGAAAGGAGCAGGAGACAGAATGGGTGGGTTGGCAAGTCTGGGGATAAAGCGGGTAGGTGACAGGCTCCAATCC
AGAGCAGCTGAAGCGAGGAGGGAGAAGGGGGCCAGGAGGCAGAGAAGCTGGAGAGCTGTGCAGAATCTCATCACCAG
GAACCTTGAACTTGCACCTGAAAAATGGGCATTTCATCCTGAAAGTACTAGAGAATCCTTGAATGCCACTAGGCAAA
GAAAGTTACACGATTTGCTTTTTAGAAGACTTCCTTGGCTGAAGGATGAGGGAGCCCAGCCAGGAGGCTGCTGGCCA
ATGTCAGAGGAAAGAGTAGAGACCTAACCCCACAGGTAGAGCTGGAAGACAAGAAAGAAGTGGCATCTTGAGACATA
GGGTTACATCTATCTTACTTTCTTTCTTTCATTTTTTTTTTTTTTTTTGCTTTTTAGGGCCACACCCACAGCACATG
CAAGTTCCCAGGCTAGGGGTTGAATCGAAACTGTAGCTGCCAGCCCACGCCACAGCCACAACAATGCCAAAGCCGCA
TCTTCGACCTACACTACAGCTCACGGCAACGCCAGATACTTAACCCACCGAGCAAGGCTGGGGATCGAACCCGCAAC
CTCAAGGTTACTAGTCGGATTCCTGAGCCACAATAGGAACTACCGGGTCACGTCTTTGAAAATCTGCTTCAGTGTTA
CTTTAGAGAAACTGTCCTGGATTTAAAATTACTTTCCTTTTGTAGTTATCTATCTTTCAATTTTATTTCTTCTTCTA
CCAGAGTGTCAACTCTGTGGGCAGATATTTTTGTGCGTTTGGTACCTGTGTGGAAACATCTGTCTATTACAGCCCCT
GGTGCTCCGTACAGCTTTGTAGGCTAAAATGCATGCCTGGTACAGTGCTTGGCACCTGTGTGTTCAATAAACATGAA
CTATGGTGATAACAACAGCAAGAATAACAGTGAGCAATGGGATGAAGGGAGTGAGGCAGAAATGAGACTAGTTTGGT
GGGACTCAAAGTGTGGACTGAGCAACCGGTAGCATCAGCATCACCTGGGAGCTTGTTAAGAAATGCAGAGCAGCAGG
CCCACAGCCCAGGAACCTGTGTCTGCATGAGGTCTGCAGGTGGTCTGGGAATGGGGCTGGTTCCCAGGTTTCTGGTT
GAAGGAGGAGAGTGGGTGGCATCGCTGCTGACTGACATGGAGCGGCGGGGCTGAGAGGAGGGGGAGTCAGTGAGTTC
TGCTCAAGAGGTGCTGAGTTTGAAGAACCTGCAGAAGTCAATTCAGCAATGTTGTCCCAGAGAGAGAGCCCGGGGAG
AGCCCAGTTTCGGAGCTGCCAGCCCAGCGTGCAGGCAGGAGTCGGCAGGTCTTCTGTGTGCCAAGGGAAAGGAGCAC
GGAGAGCAGAATGGGGCCTCCTTAATGGGCACCGCCTTGAAATCTGAGGGGCAGGGCCGAGAGGCAGGAGGAGAAAC
AAGAACAAAAGTTGTTGCTGGGAGAAACCCCATCTGAATTCTCAGCTCAGCTCCACCCGTGACCGCCTCTGGCCCTG
CTTCCCCTGGAAGAGGGAAGGCCACGGACAATTGCTCGGGCAAGGTTGCTGCTGTTTGAGAATCCCAAGGAGCGGGA
CTGTCAGGCAAACAGAGGGGTGGCAACAGAGAGGGGTCCCGTTTCCAGCTGTACCTCCAACTCCGGCAACTCCCTGC
GTGCCTGGTTGATTCCCGCCCCCTTCGGATGACAAGGTGGGGCCGGGGTCTCTGACCATGTTGCCTGCCAGCTCTCT
GGGCTCACCCCTCATGTCCGGCCACAGACTCTAGGGGAAGACCCCAGCAGAGCATAATGGCAGCTGCCTTCAGAGCA
CGTGAGGAGGCTCCAGAGGCCAGACCAAGAGGTGAGGGAAGGGCACGCAGGGTAGGAAGCCAGGATTCCCGAGCCAA
CAGGTGTGCTCTACCTGGCTCCCATCAGTACAGCTGAGAGTCAAGGTCTAAAGAAGCCTCTCTGTCCCTCAGCCAAA
AAGGGAGGCCCAGGAACCAGCAAGGGCCACTCTCTGCATTTATCAGGTCCTAGTCTGGCGAGAGGGACACGTGCTGA
CTGCAGACCGCAGCTACTGCAGTTGTGTTCAGTGGGCTGGGGCTGGCAGAGTGGGGCTGCACAGGTGTCCCCCGGAG
GAAGTCCCAGCTCCTCCCTGCCCCATCACCTGTTGTATTTTGCTTTACCACCCTCCCATTTTTGCCATTTGTGCTTG
GCCTTGTCACAGCAACCCCTCCTGGTGCAGGTAGTTTCCCAGGGCCTCTAAAATCAAGGTGCTTCCCCTAGAACAGT
TCTGATTTATACTTGTTATGGCTCAATGTTTTAGTACCTCCTTTCACTTTCAAAGGTGTGCAGGTGTGGAGGACAAA
TCATGTTGCCTGTCACCCTACATAAAAACGGTTCAATAAAATAGAGTTCGATGAAGTCCCCTTCAAGACGCCTCTCG
GCTTGGACCCTCCAGGAGTCAGGGCTTGTGTTTACCAACAGCCGGTGCCGTGACCTCCCCCTCTCCAGCATCCTTCC
TGCTACTGCCTGTGGTACAAGAGGTGGTAAAAGCCTTTCTGCCACCCCTCCCCTAACCTGTCCCCTTCAGTGCCTGT
TGCTGGGATCATCTCAGCTCCCCCTGCCTCCCTGTGTAGGCTGGGAGGAATTAAAAGTCTAAGAATTTACTGGAAAA
TCCTAAGGTTGTTTTGTCTTGGGCTTTTTTCCCCCCTCACTAGATTTTTTTCTTGTAACAAGTTGACGAGCATAAAA
GACCTTCCAAGAATTAATCTCTAATCATGAGAGATTTCCTTCCTAGTGGAAAGCTAAAAATAACAAAGACAACAACA
ACAACACCCCAAAACCTCTTAACTGAGCCCACAATGGAGATGGCTTTTCCTCTGCCTGTTCTTTGTCTTTTGCCATT
TTTTTTTTTTTTTTTAAGGGCCGCATCAGCGGCATGTGGAGGTTCCCAGGCTAGGGGTCTAATTGGAGCGACAGCTG
CCGGTCTACACCACAGAACAGCAACGCCAGATCCGAGCCACGTCTGCGACCTATACCACAGCTCACGGCAATGCCAG
ATCCTTAACCCCCTGAGCCAGGCCAGGGCTCGAACCCGCAACCTCATGGTTCCTAGTCGGATTTGTTCTGCTGCGCC
ACGATGGGAACTCCTTTGCCCGTTCTTGGAAAGAGCCAGGCCCCAGTTCAAATGCCAGTGGCGCCCCACCCCCACCC
CCCACTTTCTTGCTGCGAAGCCCTGGCTCAGTCACTTCACATTCCGAGCCTCAGTTTACTCATCTGTTAAAGAGGGA
TGATAATTCCTTACTCCTTGAATTGTTGACAAGATGAACAGTCTGTAAAGCTCCTGGTAGGTACTTGGGAAAAAAGC
AACTTGTATTATTATCGCTGGTCCCTAAGAGACAAGCACTGTCCCCACCTCATCACAGTGACAGGAGGCAGTATGCC
CAGAGATTAGAGCTTGCACTTGAGCAAGACAGGCCTGGGAACTGACTAAATGCGTGACCTTGGGCAAGTCACTGGAC
CTTCTAGGACTTGCTTTTTCTCCTCTGTAAAATGAGAATAACAGTGACTCACCATCGGTGAGATGACGCACATCAAG
CTTGGCATGACCCCTGATGTTGCAGCAAGTGCCCAATAGATGGTAGTTTCTCAATTCCCAATAGTGATTATTGCAGA
ACTCTCCACCTCACAGGCTCTGGCACCACCTGCTCTGTATCTCCAGGGTCCACTATGTTCCCCTGTCCCCAAAACAA
CAGCCCTTCCTGTGCAGGGGGCATTTACAAATCCACCTTTCCCCTTCCGCTGGAGTCTGAGCTGCAGCCCGTGAGTC
AGGCTGGGTCTCCACGTGCGGAGGAGGAGGTGGAGGAGGAGGAGTCTGGTAACTCCCCAAGGGGGGCTCAGCTGGGA
CTGGAAGCTGGGTTTGGGTGCAGCCAAGAATTTCTTCAGCCCCTTCCTGTCCCACAGGGAGCCTGATTCAGAGTTGA
AGGGAATTACGTGTTTGTTTATTTATTCATTAAATAAATATTTAACACCAGGGAGTTCCCATCCTGGCTCAGCGGTT
AGCAAACCCAACTAGCATCCATGAAGACATGGATTCCATCCTTGGCCTCGCTCAGTGGTTTAAGGATCTGGCGTTCC
TGTGAGCTGTGGTGTAGGTTGCAGATGCAGCTCAGATCCCGAGTTGCTGTAGCTGTGGTATAGGCCAGTGGCTACAG
CTCCAATAAGACCCCTAGCCTGGGAACCTCCATATGCTGCAGGTGTGGCCTTAAAAAGACAAAAGAAGACCCCTCCC
CCCCAAAACTTAACACCAATGTTGATACCTACCACGTGCCAGGCACCATTCAGGCTGCTAGGTCAATAAGGATTAGC
CTATTCTGTGCCTTTCTCACAGAGCTAGTGGGAAGTGGAGCCCTTCCTGGTGGGAAGCTGAGCCCGGACAGCAACAC
TTCTACATCCTGAAGCCAAGGTGAGTGTCCTGTGACAGCAATGAGTCAGCCCCTCTCTGGGCTCCATGGACTTCTGG
AAGACTCGGAGAGCAAGCTCACCTGCCTCCTTGCCCGTGTGGCTACAGGAACATGTTTACCACCCAGGGTCACTCTC
TCTCAAGCATGGCCCCAATCTTCTGAGCTGCCTCACTTTCCAGATGAGAAAACTGAGGCACCAAGGCAGGGAAGTAA
CTTATCCAGGGCCACTTGGTGATGAGGTGAAGAGGCCAGGGCTAGTACCCAGGTATCTGGCATCTCTCTAGGCTGAG
ACGCCTATTAGCCACAGCACCAGAAATCAAGAGCTTAGAGACGGGGCGAAGGGCTGCAGTCAATGGTCTTCTTCTAG
AGTTTTCTTATTAATGCCCAGGAAAACCTCTGATGGGACATAGAAATGCCACTGGGAAAAGGGGAGCATCGTGTGTT
TACTGGAGACAAGTGAGGCACCCAATTCAAAAAGAAGATCCCTCTCAAACATAAAATAGTTCAGCAATGGAGTAAAA
AACACCTAAATATGTGTTCCACTTACAAAGCATCCTATGGGCTGTGATGAAGAATGTGGTTTGGAAACTCCGATTCC
ACCCCATTGCCTCTGCCTTCACCTCCCACCCCAGTGTTTAGCACCAGGAGCTCCCAGCACATATCACCTACCCTTTT
CCTGGCTGCTGTCTTCTTCAATGAGCTTCTGCTTTTGATTCCCCTAGAGAGGCTGGCAGTTTCGGGCACCTTTTTGT
TCCTCTGCTTAGCAGTTGGGGCGGAGAAGAAGTGGCTTTGGGGTTTTTCTTCTCTGGGTGTGGTTTCCTAGCCCTCA
CAAAGGAAAGCCTACAGCCTGCTCTGTCTGCACCACCAGCCTGGTTGCCTCAGCTGGCAGAGCTGATTAGCATGCGA
GGTGCAGAAGGGAACAGCCTGCCTGGGGTACTCAGGATACTGTTCTACTAAATGTTTCCTGCTCTCCACCTTCATAG
TAGGATTTCATTTCCTGGTCCCCTTGCAGTTGAGTAGGGCCATGTGACTAGTCTGACCAATAAGATGTGAGTTGGCC
CAAGTATTTAATTGCTGGTCAAAGACCCTCCAGGGCTCTCTTTCTCTGTGCCATGAAGTATATTCAAGGACGTAACT
GCTCCATCAGCCTGGCTCCTTGAATGAGGAGCACAGCCCCTAGCTGACCCACGGGGCTCATGTTAATTAGAGTAAGA
CATAAACCGTTATGGGTTTGGCCCCAAAGATTTAGGGGCTGTTTGTTACTGTAGCATAACCTACACCATCCTGACTG
ATACACTGCCCATCTCACACAGAGTGAGATATTCCCTAGTTAAGTCTACCATCTTCCCAATGTTGCTCTTTCAGCCA
GAAGCCATTTCACTTCCTCTGAGCTCCCCTTGGCCTCCTGTCACACTTCTGTTCTGCACTCTGACTTCTACTTTTAG
TCCCTTATATATAATTACATACAGCCAATTTCACATTGTGAGCGCCTGAAGAGCAGGAATCTGTACCTTATATTATG
ATGATGATAATAATAATAATAATAAACAGAGGCAGCAAATGCTACTATTTATTGAATGCTGGGCTGGGTTCTAAGCA
CTTGACATTCATTCAGTTCTCACTAAGCTCTGAGAGGTCAGTACTGGAACTACCCCCACTTTACAGATGAGGAAGCA
TCTCAGTTTGGTTCAGCTGAAATTGAACCCCTAATAATATATATATATATATATATATATATATATATATATATGCA
TTTTTTTTTTTTTTGGTCTTTTCCTAGGGCCACACCCGCAGCATATGGAGGTCCCCAGGCTAGGGATCTAATCAGAA
CTATAGCTGCTGGCCTACACCACAGCCACAGCAACACCAGATCTGCAACCTACACCACAGCTCACGGCAACTCCAGA
TCCTTAAACCACTGAATGAAACCAGGGATCAAACCGGCAACTTCATGGTTCCTGGTCGGATTTGTTAACCACTGAGC
CACGACGGGAACTCTTAATATTTTTTTAATAAATATAGTTCAACTTAAGTCATTCCCTCTATAATCCTAGTCACTTA
TTTTTCACATTTAAAACATTCCCAGAAGGGGTCTATAGGCTCCCCCAGATGCCAAAAGAGTCCATGGCACAATAAAG
GTTAAGGTCCCCTGTAGAAGCAGATACCAGGGTTACAGTGACAGGGTTCTGTCCCCTGTTCTCCTGGAACCCAGAGT
TTCTGGCTGGTGGAGGGTAAGGGACCCTACACCAAATTCATGCCACAGTGGGGAGTGAACAGGAGCTACTTTATTGT
ATTCACATAGCATAAACATAAATATCGTAGGTTTGGCATATGGAACTCCCTGTCATGAATATTTTGATTTCAGCAGT
GTCAGCCCAAGTATAACATTCATCACAGTAAAGAAGTCACTTGTTTCCCCAGTAAAAAAACAAAACAAGGGCGTTCC
CTTCATGGCTCAGCGGTTAACAAACCTGACTAGGATCCGTGAGGATGCAGGTTCGATCCCTAGCCCCACTCAGTGGG
TTAAGGAACTGGCGTGTAGGCCGGCAGCTGTAGCTCCGATTCAACCCCTAGCCTGGGAACGTCCATAAGTCGCAAGA
GTGGCCCTAAAAGGCAAAAAACAAAACAAAACAAAACAATTCCTAACATCCAGTGTGCTAATTAGAAAAGCATCAGC
TCTTGATCACAAATTGGGATAACAGGACAGCAGCCATCTCTGGTCAGTCCCACTCCCAGACGATGCATCCTTGAGGG
CAGATGGGCCGACCACCCACGATGAGACTTGCTTTCTTAGCTTCTGAGCACTGGCTTGGTCCAAGTAGCACTCACAT
AATCTCCCATATTGTATATGCTGAAGTTTTATACTTTATTGAACCAGAATTTACTTTAAATTCCAGGCATCCAAACA
TATACACTGAATCCAGGTGAATCCAAGCAGAACTCTCTGGATTTCAGAAATCCTGGGTGATTACAAGACTCAGGGAT
AAGGTAGCAGAGCCAATGCTCTGTGCCTCCTTGCCAGCTGGCCAGTAGTGAGGGCTGAGCCCCAGGACAACCGGGTG
GCAGTCTGGCACTGCCCTGGTGGGCTGGATGACCTTCCGCAAATTACAGGCTCAGTTTTCGTATCCTCCAAATATGG
AGCCATACTAGATCCAAGTCCAGGCAAGAAACAATCACAAGGCACCCGCGCTACGCCTAGTACTGTGGGGAAAACAG
AAATTACACAAACTCCATAAGGAGCTTACATTCTAGTTGGGGAGCCAGGCCTGGAAACAATTTAACTATTGTGCACG
ACAGAAAGAAGTAAGTATGAAGGTGGTGGAAGCCCCCTCTTGTGCTCTGGGACCACAGAGGAAGCACGAAGCCAGGC
TGCATAGGCCTGCGCAGCTCGGTTTCAAAGAGGAAGGGGCTATGCTTGAACTGGGCTTCAGAGGGTGAGTAGGAGTC
TGATGGGTGAGGAAGGGCATACAGGTGGAAGGGCAAGGATCTGCAAACTCGGGGTCTGGAATGGGAAGCCCCACCCC
CAGCCCAGATCCCAGCCCAGGGGTTCCAGTCCTGCTCTCTCCACACATCCGCTGCTTTGGAATCTGGAAGAGTCCTG
GAAACCTGTATTTTGAACAAGCTCCCACAGTCATTCTCACAAGCAGGCAGTGAGTGTTATAGATTGAGAAAAATGAA
TGAACAAATGAATGAATGAATACAAAAATGAACCTGAGAAGTTCCTGTTGTGGCTCAGCAGAAACGAATCCGACTAG
CATCCACAAGGACGCAGGTTCAATCCCTGGACTTGCTCAGTGGGTTAAGGATCTGGCATTGCTGTGAGCTGTGGTAT
AGGCTGCAGGCTCAGCTTGGATCCCACGTTGCTGTGGCTGTGGTGGAGGCTTTCAGCTGTATCTCTGACTCAACCCC
TAGCCTGGGAACTTCCATATGCTGAGGGTGCAGCCCTAAAAAGACAAAAAAAAAAAAAAAAAAAAGAACTTGACTTC
CGGTAAGTCCCTTTCTCTCTTAGGATGTCCACACTACATTAAGGAGCTAAAGAGCTTCAGTTGTGGCTCAGCAGTAT
CCATGAGGATGCAGGTTCGATTCTGGGCCTCGCCCAGTGGGTTAAAGGATCCAGTGTTGCTGTGAGCTGCAGTGTAG
GTCACAGACAAGGCTCAGATCCTGTGCTGCTGTGGCTGCAGCTCCGATTTGACTCCTAGCCTGGGAACTTCCATAGG
CCACACCTGCGGCCCTTAAAAAAGACAAAAATGAAAAAATAAAAAGCAAAATAAAAGTGCTGAATTGGCCTGGTGGC
TTTCAAACTGTGTTCCAGAAAAACCCCAGAATCTCCCTGAAGTCCCTCAGGGACACAGAGGAACTGGGGAGGCTGAG
AGAGCCGGACTCTGGGCCCCATCCACCCTTCTCAGATTACCTCTCCTTTTATCTCTTTGCTCTTTTTTTTGCAATAA
AGGGTTCTTGGCTACAAAGAACTCTTAAAGCCACTGAATTGAATAATCCTAGAATTCCCAAGGAGTCAGAGTTCCCA
TTGTGGCTCAGTGGTTAACAAATCTGACTAGCATCCGTGAGGACGCGGGTTTGATCCCTGGCCTCACTCAGTAGGTT
AAGGATCTGGCGTTGCCGTGAGCTGTGGTGTAGGTCGCAGACGCGGCTCCGATGCTGTGGCTGTGGCCAGCAGCTAC
AGCTCCTATTCAACCCCTAGCCTGGGAACCTCCATATACCACCAGTGCGGCCCTAGAAGACAAAAAAAAAAGAATCC
CCAAGGAGAAATTTAAAAATTTCTTGAGGGCAGCAGCTTACCTTTGGCAAGTATGAAGAGAGCATAAGGGTCTTTTT
CAGAAGCAAGTTATTTAATCATCACATTTTAAAAACCTTTTGCTGTGGCCCAGAAATTAGTGAGTGAAGGAAAAAAG
CAATGTGGTATAATAATGCAAGGGAATATTATGCAACCTTTAAAGAACACTTTTGAGGAATGGTTAATACAATGGAA
AATAAAGTGAGGAAGTCAGATACAAAATTTCATACAGACTGTGATTTACGGTATGGATTTTTTTTTTTTTTTTTTTT
GGCTACACACATGAAAGTTCCCAGGCCAGGAATTGAACCTGCCACAGCAGTGACCTGAGCCACAGCACTGACAACTC
TGGATCCTTAACCCCCTGCACCAGCGCTATGGATCTTATACATCAAAATTATTGGACATGGATGTTAGTAGGCCGGT
AGCTGCAGCTCCGATTTGGACCCCTAGCCTGGGAACCTCCATATGCCTCGGATGCAGCCCTAAAAAACAAAACAAAA
CAAAACAAAAAAAAGAAGAATGCAATTCTGACATGTTTCAGCACAGATAAAGGTTGAAAACATTACGCTAAGTGAAA
TAAGCCAGACACAAAAGGACAAATAGTGTGTGATTTTACTGAGATCAAGCACCCAGAGTTGTCACATTCACCGAGAC
AGAAAGTAGAAGAGCGGTTACGGGGGTGGGGGGGATGGGGGTGGGCAGTGGGAAATTACTGCTTAAGCAGCACAGAG
CTTCTGTCTGGGATGATGGAAAAATTCAGATGGTTGACACTGGGGATGGCTGCCCAACGTGTGAATGTGCTTAGTGG
TACCGAACTATGCCCTCAAAAAGCATTAGAATGGTTTATGCTATGTATCTTTTACCACAATAAAAGGGGAAAAAAAA
GCCAGAACTAGGTGCATAGGTTATAGTGGTGAATACTATGCGACAAGCTTGTGGGCAGCGTGGTCACTTTATTCTTT
GCATTTCTCTGCATTTTTCAAACGTCCTATGATGAGCATACATTTCTTTTTAAAACCAGACAGAAGAGCGAGTTAAT
TAAACAAATCTCGTGGTTCTCTGACACTTTTGCCCAAATGCGTTACTGTCTTTTGCGTAAATGTAAGGTGTGTTCCC
TGTCCTTCGTTAATAAAAGGAGCCGAGCCCAAGGATGCCAACGAAAGGATACACCGAGGTGCTCAAGTCAACGACAG
GCACAGCGGCCCTCCTTTCTAAGACTCGTTGCTCTCGTCTATATTTAATAAGTTCCAAATAAAAACAGAACCCAAAC
AAATCCTCTAATGAACTTCCTAAGAAGCTGTCTGGCTTGGAAAAGCTCAAAGGCGAACTGAAGAGAAAGGGGGAACA
GCTGCTGTGTTTTTAGGGCATTAACTCACTGCAGCTGGGACAGTGCCTTTGTCAGTAGATTTCTATCCCTTCTTGCT
TCTGGGAAATGTTCTTGGGCAGAATGAATTCAGAAACCAGGAGAGGCTCCCCAGTGGTATTCCCTGCCAATCCATCT
GCTCCAGTACCCTCTCCCCACCCCAGAAACATGCTGAACAAAGATTTAAAGACTCTTGGTGTGAAGGGCAGCCACGT
GTCTGCCTGCCAGGGTGCCCTCCACCCCAGGCCGCCTGGGTCCACTTGCCCGGCTCCTGGGCCCTCTGCTCAGGGGT
GGCACAAGGGCAGAAGGTAGCTGCCACGATAAGCAGACCGGGGCTACCCCTGGAGTGGCCCCTCCCTGGCTACGTGA
CCTCTGCCTTTTTCAAATGTTCTATGATGAGCATACGTTTCTTTTTAAAACCAGACAGAAGAGCGAGTAATTAANNN
NNNNNNNNNNNNNNNNNNNNNNNNNNNNNNNNNNNNNNNNNNNNNNNNNNNNNNNNNNNNNNNNNNNNNNNNNNNNN
NNNNNNNNNNNNNNNNNNNNCGTATATGGACCATACCACCTTCCCCTGGCCCCAGGTTCTCACCTATGTGACTGAGG
GAGGTGGACTGGGGCACCTCTTAGATCTCTGCCAGCTCACACATCCTATGATTGCATCATCTCAAAAAGAAAAAGAA
AAACCAACAATACCTAAACCAAACTAAACCCTAAAACCAAAACCAAAAGCAGGGTGCCTTCTAGGAATCTAGGCCAG
GTTCTTACGTTTGGGGGGGCCTTGGGGTCCCTATCTACAAAATGAGGCACGGAGTTTCCACCATGGCACAGTGAAAA
TGAATTTGACTAGTAACCACGAGGACGCAAGTTCAATCCATGGCCTCGCTCAGTGGGTTAAGGATCTGGGGTTGCTG
TAAGCTGTGGTGTAGGTCGAAGACGAGGCTCGGATCTGGCGTTGCTGTGGCTGTGGTGTAGGCCAGTGCCTAGAGCT
CCAATTGGACCCCTAGCCTGGGAATTTCCACATGCCACGGGTGTGGCACTAAAAAGACCAAAAAAAAAAAAAAGGGA
AAAGAAAAAATTTGGCACAACCTTCCAGCTCGTTCCATGTCCAACATCTGTAATTCCTGAAAGGAAGGCCCCATCCT
CCCCTTGCCCTCCACCACGTCCTCTACCTCAGGCCAGGCTCACAAACAGGAAATATGACATTCGAGAGCAGCAGAAG
CACTGCTTGCTTCTCGACAGCATAGGGGCCGATGGAGAACAAAGAGTTTCTGAGCTTTTCCAGCAACAACCAGGGCT
CCATGCCCAAGACCTTCCCCAAGCAGTGCAGGCAGAGGACACTGCTGGGATGGGCTGGCCTCCCATGCCATCCCCGC
CCCGGTGTGTTCCCAGGGGCCCCCGGCAGCGCAGAATCAGCAGATAAGCTGTCTGGCCGTAATTACACGCTGATGCT
TGACCAAAGGTGGTAAAACCCTAAACAGGCGGAAGGCAGGGTGCAGGATTCCTGGACTCCAGTGCAGGAGTGGAGTG
ACCCTAGAGAGGCCCTACCCCTCTCTGGGCCTGAGTTTCCCCATCTATTTTTTTTTTTTTTTTTTTTTTTTTGTGTG
AGTGCGTGTGTGTGTGTGTGTATGTCCCCCTCTATTTGAATGAAAGGGCTAGAATGGGGCCTAATGGCAGCTCTTTG
CTTGCTCCGAGGTCTTCGGTTTTTCTTTTTTCATTCCATTTTTTTTTTTTTTTTTATGGCCACACCCACGGCATATG
GAAGTTCCCAGGCTAGGGGTTGAATTGGAGCTACAGCTGCCGGCCTACACCACAGCCACAGCAACACCAGACCCCAG
CTGCCAGATCCCTGACCATAGCGGATCCTTAACCTTACACCACAGCGGATTCTTAACCCACTGAGTGAGGCCAGGGA
TCAAACCCGCACCCTCATGGATCCTAGTCGGGTTTGTTACAGCTGAGCCACGACGGGAACGCCTGATGTCTTCTTTC
TGAAGGCAGTGTGTGGCCTTGATGAAAGGCCCCATCATCTTGCCTGTGTCTGCGTCCCAAATCTCTCCCTCACCACG
TGACCCTGAGAAACTGCTAAATCTTTCTGTGTTTCGTTTGCTCATTTGTAAAACTGGGGTTGCTGGGTGATGAAAAG
GCAGAGCTCCTGTAAAGCTCCTAGGACAGCTTCTGGAGTTAGCGCCCAGGAAGCGTGCGCTCTTGCTGTTTTATGAT
TTCTCTGGTTTCAGAATCGCTCCCCTTGCCCTGTTTGCCATCTGAAGAAGGAGCAAGCATGGCCCAGAGAGCCATAC
TGGCCCTGCAGTCCACGTCTAGCCCTCTCCCTCCAAGAAAGCACATGTGAATCTTGGTCAGCCAAGCACAGTGGGAA
GAGGGAACTATGGGAGAAAAGGCAGAAAATCCTACGATGCTGCCCCACAGCAGATGGGCTCGGGTGTCAGCTGCTCC
CAGGGGTTGCTGGGCACTAGAGAAGGCCTCCAGCTGCACCCAGAGTCAGTAGCGGAGGGAGGGTCCTGGGCTCATCT
CCAGCTTGATCCCCGAATGGGGAGGAGAATGACCCCGTGGGAAGGAGGGTGATGAGATGCAGAAGATGCAGCCGGGT
TTATCTCTGTTCCTACTTTGCCGGGACCATTCAGGGAAGAGGAGGCCACATTCAGTCATCTCAGCCCCGAGGGGAAC
AGGGAACAGAGAGGGGTGAGGATGACAGCACTGGTGGTCTCTCCCCTGGGGACATGGAGGTGTGGCCTCCCTCTGCC
ACAGGGAGGGTCCCAAACCTGCCTGTCCTCAGTGTTCTCACCTGCCAAGGGAGGAGACGCAAATGCCTGTTTCCACC
AGGCGCTCTAGGGTCTCAAATTGTGGCTGCGGACGGATGCATCGAGGAGGCACAGAAATTGAGAGTGTTTTACTAAA
GGACCAGTCCACAGGGGATTAGAAATAAAGGAAGAAAGGCCTGATCTTCTACCACACTGTCCTAGGACATAAAGCAT
GATGCGGGAGACAGGCAGGACCCCTGTTCCGCCTCCTGGGGCTACCCCGCTTGGCTCCAGTGAGCTCTGTGGTCCAG
GTGGAATTGTGGGCTCCCATCTGGCTGGGACGACTCACCCAGACAGACTGCCCTCCTGATCCGAGAGCATTTCACTC
GGCAGCAAATTCAACCCACCTCAAAATATCAGCTGCCCCTGATCAGGCAGGGCCTGGCTCCCTCTCTGCCAAGCCCC
ACAGGGCTGGGCTGGGATCAGTCATGGCAGCTCAAGGGAAGTCACGCTGCACCCAGAGGTAAAAGCTGTCCTGGCAG
AGAAAGAGAAAACTGATGGTCCTAAGAACAAGCACACTGGCTTTCACCCTTGAGGACGCTCAGTTGAGAATCTCGGT
TTGGGAGTTCCCATCGTGGTTGTAGATGGCTCTGGTGTAGGCCAGTGGCTACAGCTCCAATTAGACCCCTAGCCAGG
GAACCTCCATATGCCGTGAGTGCGGCCCTAAAAAGACAACAAAAAGAATCTCTGTTTGGCTGCCCTGTGTGGCAGGT
ATGCATTTATCAGGTATAGAGACATTTTACAGATGAAGGGAGCCCAGGGGATCTTTGCTCAAACTCTTTTTTTTTTT
TAGCTTTTTAGGGCCACACCCGTGGCATATGGAGGTTCCAAGGCTAGGAGTCGAATCAGAGTTTTAGCTGCTGCCCT
ATGCCACAGCCACAGCAATGCTAAATCCGAGCCACATCTGAGACCTACACCACAGCTCACGCCAAAGCTGGATCCTT
AACCCACTGGGCGATGCCAGGGATCAAACCTGCAACCTCAGGGTTCCTAGTGAGATTCATCTCCACTGAGCCACGAT
GGGAACTCCCAAACTCTTTTCTTTTACAGATAAAGAGGCTCAAGGAAAGGAGCACCTTGTCGCAGAAGCAGGATTTG
AACCCTCCAAGGCTCCTAGCCCCATCTGCATTCAGCCTGCCAATCCACGGTTAGGAGGGCCAACTGCACACATGCGC
AGTGTGGGATGTGGTGAGGAACCACACAGGAAAAGCCCTCAGTTCTCACAGAGCTCACATTCTAAACAAACAACAAA
ATCAGTCATTATAATTAACAAATCATTAAAGACATAATTTCAGGTGGGGGAGAGGGTTATAAAGCAAATTTAAAACC
TGGCGTGTTTGAGAGTGTTTTGGGGTGGGGGCAGCTGCTGTTTGGGAATGGCCTCTTTGCACTGGATCCTCTCAGGT
CCTCCCAAGCCAGTAGAATGCTGGAGCTGGCTCCTGCTGGCTTGCAAGGGCCACGTCTCATTAGGAATTTGGCGAGC
AAGTTGTTCACCACAGCCATTATTAAAAATTAAATTACATAAACTTAGAACTAAATGAATTATAGTACGACGGAAGG
TAATCATCAAAAGTCATCACTCCCTCGGGTTCCCAGGTGGCCTAGCAGTTAAGGGTTTGGTTTGTCCCTGCTGTGGC
TCAGGTTCGATCCCAGACCTGGGAACTTTCCAAGGCCACAGGCACGTGACCAAAAAGAAAAAGAAAAAAAAACTTCA
TTAATTTCCTCTTTGTATGACCACATACTATACTCTTGAAGTTGTTTATATCTATTGAATCTAGACGTAATAGATAC
TCCCAGTTCCTCCAGTAGTAGCTAGAAACTGGTCATGGTAGAAATATGTCTACTATGGAAACTGGCAAATACCCTCT
ACGAGGGCTTTCACTTTTCAAAGAGCTGGTGGTGAAATATTTACCAGCACAGCCTTCAGCTCTAATCCAGGCCTTCT
ATGCCTGTGGGAGTCTGGGTTCTTCCAAGGAGAGGGTGTGGTGGTATAGTCTAACTCTCCTGGGGCTGGGGGCGAGG
GGAGGTGGTGGGCAGTGCCTCCAGCCCTGTCCTCTTCTTCTTCTGTGTGTGTGTGTGTGTGTGTGTGTGTGTGTGTG
TGTGTGTGTGTGTGTGTGTGTGTGTGTGCTTTTCAGGGCTACTCCCTGGAAAGTTCTCAGGCTACATGTTAAATCGT
AGCTGCAGCTGCCGGCCTATACCACAGCTCATGACAACACTGGATCCTTAACCCACTGAGTGAGGCCAGGGGTCAAA
CCTGAGTCCTCATGGATACTAGTCGGGTTCCTTACTGCTAAGCCATAATGGGAACTCGGGCAGTCAGATTCTTAACC
CACTGCACCACAGCAGGGACCTTCTTCAAAAGTGTTTTTCAACAGGGATCTGTAAGAGGGTGATTCATTCCTTCCTT
TGTTATTTATTTTTGATAAATGAAATCCTATCATAAGCATACCAATATAAATTTAAAGGAACCCTGCCGAGAATCTC
TTTGTATAAATGCCTGCAGTCACTTCTGAGTTCCCCTAGATTTTCATAGGTGGAGGGACTTCCTTAGAGAATATAAC
TGTTCTCATTAACAGCAGACTGAAGTTACTATTACCTCTACTAATAACAATGACAACTGTAGCTGTCTTTTACTGGC
ACCACCTCAGGCACTAGGCACATATATTATCTCTAAAGTCTACATCAACCCATTTTACACATAAGAACGTTGAGGTT
CAAGGGTTCAATAACTTGACCTGAGGCCAGCCTGCTGCTCTGAAAGTTTCACAGAAGGCTTTTTCCTTCTGTAGCGA
CAGCCCTGCGACTCTCCTTAGACCTGCAGGATTCTGTGGTCCTACAGGACCCCCCATCTCTGGTGGTTTGGGAGAAT
TTCGTCACGTCTCAGCTTAGTGTAAGGAACTCCCTTCCATCAGCAGAACAGAATGAGCCAGACGCTCCCCCTGGACT
TTCTTTTTTTTTTTTTTTTTTTTGTCTTTTTGCTACGTCTTTGGGTCGCTCCCGAGGCATATGGAGGTTCCCAGGCT
AGGGGTCCAATTGGAGCTGTAGCCACTGGCCTACGCCAGAGCCATAGCAACGCAGGATCCGAGCCACGTCTGCGACC
TACACCACAGCTCACGGCAATGCCAGATCCTTAACCCACTGAGCAAAGCCAGGGATTGAACCCGCAACCTCATGGTT
CCTAGTTGGATTCGTTATCCGCTGAGCCACGATGGGAACTCCTCCCCCTGGACTTTCACCTGCAATGCAGGAAAGTG
ACCCAGGCCTGGTCACTTAGCAGCTTCCCACCCAAAAGAAGTAGCACTCAGGTTCTGATACCAGTGAAATGTTAACA
GCGGCTCCAGTGCCAGCAAGAGCTAGAATTAACTCCTGTTGGGAGACCCTAACTGTGTTAGGTCTGTTGCCTGACCT
CTCCTGGTTCTGAGCAGCTTGGTTTTCAAGCTCCCCCAGGAATACCATGAGCAACAACCAAAAAATCCTTCCAAGGC
ACATACCTCTTCTGCCTCGGTGAGCTAGAATCTCCATCGGTTGCTTGTAACCACAATTTCTGACCCGTACCTCATCT
CAAGCGCTTCTCAATATATCAGCCGCAAACATTCGCTGAGCCTTTCATGCCAGAGAAGGAGCTCCTAAGCACTCAAT
TAGTTTGCACAGAGGAATAGTAATCGTGCCTTTCTGTGCACAGCTCTGGCATAACCTATGAAAACGGAGTTTGCCAC
ACAAAATAGCAATCTGCAAACAACCACAGCTCAACTGAGAGCAAATCCAGGCCCAGTCCCTGCTCCCCGGGAGCCAT
ATTCCCCCTAAAGAAAACCCCTTCCTTGATTTTGTCAACGGTCTTGTCTTTCCCCACAGATGCCAGGCAAGTTCCTC
TTGGGGACAGCTGGCCGGCCACTTGAGGACTTGCGATTTCCCTGACGTAGGAGAAAGGACAGCTGGGTTTCTGCACA
CAGATGCTGCCAAGCCCAACGTCACCCTTCTGGGCAGCTGACCCATTGCCCCGGGCTTGCTCCCTCCCCTGTGCCCC
TCCAGACACCAGGGCCATCTGGATTCTGGAACAGCCATGGGGAAGATCAGGATGACTGGTTCTCAGGACCCCTTTCC
TTTGCCTGAAACGCTCTTCCTTTTTCACCCTCTACATCCTGCGGGCCTCAGTTTAAAGATCACTTCCTCAGGGAAGC
CCTCCCTGACCACTTCCCCAGACAAGTTCAGGGCCCCAGGACCCTGCCCTGTTTATCTCCTCCATGTCTCTGTCTGT
GCAGTTCATTGTTTACTGACTATCTCCCCAGCTGAATTCTAGCCTCTGCACAGGAAGGGATTGCACCTCTGTTCACC
GAATCTCAGGTTATCTAGCACAGCATGTAGTTCCATAAATCCTGAACGCTTTAAAGATGAGTGAAGGACATTCTGGC
GGCTCAGTGAGCGCTGAATGAGTATCTGATTTAAAGCATGCATCTCAGCAACAGGTGCATCTTTTAGGACCACCGTT
TTCTGGTGCCCAAACTCACAAGGGCAGGGTGAAAATTTAGCCATCCCTACTTCTCCCCGGGTCGTTTTTAGTTTGAA
GGTTTGTTTCCTGTGGGTTGGGACTGGCCCGATTTTTGTTTAACAGCAGCTATTGCTCAGAGAGGAGTTTGCTAGAT
GCCAGCCTTATACCACCTGGTTGATGGGGAAACTGAGGCCCCTACCACTGGCTGCACCAGCACCGGCGGGGCGAGAC
CAGCTCTCTTTCAGCCCAGAGCTCATTTCAGGGTCCTTCGCCCCACATGGGGCCAAGTCCAGGGCATGCGAAGCAAG
GCTCGGGAAGATAAGGGCACCCAGACGGGGATGGAGTTTGAAACTTTTATTAAGAACGAATCAAGAGGGAATTCCCT
TCATGGCTCAGTGGTTAACGAACCCGACTAGGATCCATAAGGACAAGGGTTTGATCCCTGGCCTCGCTCAGTGGGTT
AAGGATCCAGCATTGCCGTGTAGGTCACAGAGGCGGCTCCCATCTGTGTTGCTGTGGTGTTGCTGTGGCTGAGATGT
AGTCTGACAGCTACAGCTCCGATTCGACCCCTACCCGGGGAACTTCCACATGCCATGGGTGCAGCCCTAAAAAGCAG
AAGAAAAAAAGAAGAAGAAATCAAGAGACCTGGCCTCTCTCTCTGCCCAGCCTCTTCCAGCTGCTACCTTCCACTCT
CTCCGGCTAGTTTCAGGTTGAGCAAGGCCAGGCAGGAGCCCTCTCGGGGGCTGAGCATGGATCTGGGCCCCAGCAGC
GCCCCCAACCTTCAGATTCACCTTCACTCTCCTTGCTCAGGGCCCACCAGGGTCTCCAAGCCAAACTATGTTTGAAG
TCAAGACCAGGCTTTCATGCTTTGGTTCTGCCACTTCACTCTTGAGAGATGGTGGCCAAACAATTAAAACGCTGAGC
CTCAATTTCCCTGCCTGTAAAGTGAGGAGGCGGGGGGATAATTCCTGCTTTGCTGACTTCATAGGGCTTTTGTGAGG
CTCAGGCGAGGTAGATATATGTACTCACTCGTCTAACTGTCCACTAGCTTAGAGAACTCTAACAACAACTCTAGGAG
TTCTGGCAGTGGGTTGAGAATCCGACTGCAGCTGCTCAGGTCACTACAGTGGCACGAGTTCGATCCCTGGCCCTGTG
CAGTGGGCTAAAGATCTAGATAGAGTTGCGGCAGTGATGGCATAGGTTGCAGCTGTGGCTTGGATTCAATCCCTGGC
CCGAGAACTTCCATATGACGTGGTGCAGCCGTAAGGGAAAAAAAAAAAAAAAAAAAAGATACTGTTTTTCTGGTCCC
ATTAGGGTCTTGCGATCAACGTGTAGCCAGCCCATGTCCTCCAGGGCCCAATCCTCCACCCAACCTCTCAGCCAGGC
TCTCCTCTTGACCACATCCTTCTAGAAATCCTTTCTGCCTCTGCCTTCCTGGATGTGCTCCCTCTGGGCTCTCCTCC
ATCTCAGGTCACTCATTCTCCCAGTTAGGACCTGGCCCACCTGGCAGCTCCGTGCTTTTTCCTGCCATTCACGTCAG
CCAACCACACAGGGCCTGGGACAGGAACTGCAGGGAACACATACCAACACTCAGATCCCTGGATAAGGCTTGCGTGC
GCATTCCCTGGGGCACAAAACATGCGCACAAAGCATTGTGTCCCCACCCCACTGCCCTCACCACCCCTCCTTTGCTG
GGGCATAGGGCAGAACCCACAGCAGACGGAAATTCCCAGGCTAGGGGTCTAATTGGAGCTACAACTGCCGGCCTACA
TCACAGCCACAGCAACGCCAGATCCAAGCCACATCCACGAAGTACAGCACAGCTCACAGCAACGCCGGATCCTTAAC
CCACTGCGCGAGGCCAGGGATTGAACCAGCAACCTCATGGATACTTGTCAGATTCATTTCCACTGTACCCCGACAGG
AACTCCACCACTCCTCCTTTAAGAGACTCTATTTGGCAATAAAGCCAGAGCCAAGGCTCTGGCAAGAGTTGCAGCCA
GGTCTGATCATAGGCAGCCAAGGTCTGTGGCCCTCCAAGCCGGGCTGGGACAAGCCAAGCAGATCAGCTCCTCGGCT
GGAGATTTCAATGACATATTTTTAGGTCAGCCTCTCTTTAGAATTGCAAGGACTTTTATAAATAATTCTGGGTTAAG
TATATTCCACATGATGACCCTTCTGCCTTCAGTCCACAGTCCAAATCTACATCACTCTCTGGTGTCCCAGACTGACC
CACCTGGCTTCCCTCTCTCAAGACTAAGGCTGAAGCTTTTATCAGCAGACCTTGCAGCCCAGGGCAGGGGGTTGGGC
AGGGGGGAAACGACTTTGCCCCAGTTGCCCTTGGGAGGCCACTTACCCACAAGTGTGGGTTAAGTAAAGGGCACTGC
GGTCACATGCCCAGTGTGCCATCTGGCTTCAGCAGCCACCGTCAAAGAGGGAAGAAAAAGTGACATGCAACAGAATG
TAACCGGGGCATGGCCTGCAGGATGCCCAGGGACCTGGGGGGCAGAGGGGTGCCAAATTCATGGGGGGCTTCTCAGA
GAGGGTGGTGATTAAGATGGGCCTTGAAGGATGTGTAGGAGTCTGTGGGAGGGTTTGGGGAGGAGGTGGGAGGGTGT
CCTGGGCATGGGGAAAAGTCCAGAGCCATCGAACCAGGAGAGGGTTTCAGGAATTGCAGCAGTTCCCTCAGGCTGGA
GCAGAAGTTCCAAAGGATGGAGTGGTGAGGGTGGTGAGGGCTTCAGAGGGCTGTCTGTATGGGACCTTGGAGGTCAC
CCAAAGGAATGTGTGCTTTATCCTGAGAGCAGAGGGAGCCTTGGAAAAGATGGAAAACTCCAATCAATTAGGTGTTT
GGAAATGAGACTTAGGCTGCAGGGAGAGGGTGTATAGGAACAAAGAACAGGGAGCATGCAGCAGCAGGGGCTGGGCT
GAAGAGGGCTGCCCACCAGCACAGCAGGGGCAGGGGGGCTGGAAGGAAAGGGTCTCTTTTTTTTTAGGGCCACACCT
GCGGCATATGGAGGTTCCCAGGCTAGGGGTCGACTTGGAGCTGTAGCCACTAGTCTACACCACAGCCATAGCAATGC
CAGATCCTTAACCCCCTGAGCAAGGCCAGGGATCGAACTCATGTCCTCATGGATGTTAATTGGGTTTGTTAACTGCT
GAGCCATGACAGGAACTCCTAAAGGGACACTTTGGAGAGCTGGTAAAGGGGTGGGATTGACTGAACTAGATTAGACT
GGAGGGGAATGTTTGTTATGCAGCATAACTGCAGCCAAAGCTAACAGAGGGGCCACATGAGCAAATATATAGAGACA
GAAAGGCCACTGCCATGCTTGAAGAAGCGGAACGATGGTGCTGATGGTACCAAAGAGCAGGCTGTGTGATGGGCATT
AGTTTGGAGAGAGAAAGATAGGTGGGGACCTGCACGAGGGAGTTTCTAACAAATATATGAAGTTGATTGGATTGTTG
TTCCCAAGTATCTATTCTGGGCCAATAGGCAGAGCTTATCGCAGTCCCATTGACTTTAGACTCAGTCACATGACCAG
CTTTGACCAATGGAATATGGATAGAAGTGACCATGTGCCAATTCAGAGATTTAATTTTTTTTTTTTTTTTTTTTGTC
TTTTGTCTTTTGTTGTTGTTGTTGTTGCTATTTCTTGGGCTGCTCCCGCGGCATATGGAGGTTCCCAGGCTAGGGGT
TGAATCGGAGCTGTAGCCACCGGCCTACGCCAGACCCACAGCAACGCGGGATCCGAGCCGCGTCTGCAACCTACATA
CACCACAGCTCACGGCAACGCTGGATCGTTAACCCACTGAGCAAGGGCAGGGACCGAACCCGCAACCTCATGGTTCC
TAGTCAGATTCGTTAACCACTGCGCCACGACGGGAATTCCTTATTTTTTTTATTTTTTTGTCTTTTTGTCTTTTTAG
GGTCTCACCCACGGCATATGGAGGTTCCCAGGCTAGGGGTCCAATCAGAACTGCAGCCGCCAGCCTATACTAGAGGC
ACAGTGGATCCAAGCTGCATCTGTGACACTGGATCGTCAACCCACTGAGCAAGGCCAGGGATCGAACCTGCAAACTC
ATAGTTCCTGATCAGACTCGTTTCCACTGTGCCACAACAGGAACTCCCTCAGAGATTTTATGTTATTTATTTATTTA
TTTATTTGGTCATGTAGCAGTTTGATGTGGGATCTCAGTTGCCAGAACAGGGATTGAACCTGGGCTGCATCAGTGAA
AGCACCCCAAGTCCCAACCACTAGACTACCAGGGAACTCTCAGAAACTTTAAGAAGCATTGAATTATCTCTTTCTTC
CTCCAGCTCTCAGCATCAAAATGACACATTCTAGGTAGAAGGAGCAGCTTCAGCCTGGGTCCTGGGAGGAGAAGATA
CATGCTGCAGATATTCTATCCTGCTGCCACCTGGAGCAGATCTACAAAACCATGCAGTTGCAACTGCCTTCTGGCTG
ACAAGCAGTGTGAGCAATAAATAAACCTTTGTGGTCGTAAACTAAGATGGGGGGGATGTTTGTTATGCAGCATAAGC
TAACTGATACACACTATATATGTGAGATGATAAGGATGCAGATGGTGAAGAACATCACATGTCACGATTAGTTGTTG
TACACATGGTGAGTCAACAAAGAATTTTGTAATTGATGAACCTTCTCCACCTTTCCTTTAAAGCCAACCCTCTCCAC
TCCCTTCTGCTCCTCCTAGCCCCTTGCTCTATCAGCCACCCCTTCCCTCGCATGGACTGAATCCTTCCCCTGAAACT
ATATCTCACTTGTCTCTTCCATCCTAAAATCCTTTTCTTTACTCTGTCTTCCTCCAACTCTAGCTCAGTCTCTTCCT
CGACCATCTCAAACAAACTTCTTCTTCTTCTTTTTTTTTTTTTTTTGTCTTTTTAGGGCCACACTTATGGCATATAG
AGGTTCCCAGTGTGTGACCTACACCACAGCTCATGGCAACGCCGGATGCTTAAGCCACTGAGCAAGACCAGGGATCC
AACCCATGTCCTCATGGATGCTAGTTGGGTTTGTTAACCACTGAGCCACAATGGGAACTTCTTCAAACAAACTTCTT
AAACGAGTTGATTCTCCTCATTATCTCCACTTCTTTCTCCCTCACCTCCAAGCAATCTAGTTTACCTTCCCTCCACC
CCACCAAAACCATTCCCAGTATATTTCAGCAATCTAATAGTCCAGTGCAATCCAGTCCTTATCTTCCTAGACTGTTC
CACATCATTTAGCTTGGAACTAAATTCATTTTCTCCCTGCCCAACCTCAAATATTCTTCTTTCCATGGAGTTCCTGT
CATGGCTTGGTGGTAACAAACACGACTAGTATTCTTAAGGACTCCGGTTCCATCCCTGGCCTCGATCAGTGGGTTAA
GGATCCGGCATTGCTGTGAGCTGTGGTGTAGGTTACAGACTCGGCTCAGATCCCTCGTTGCTGTGGCTCTGGTGTAG
GCTGGCAGCTGCAGCTCCAGTAAGACCCCCAGCCTGGGAACGTCCATATGCCACAGTTGCGGCCCTAAAAAGAAAAA
GAAAAAAAAAATTCCTCTTTCCATATTCTCTCAGCTAGTGGCACCATCATTCATCCAGTGACTCATGACAGAAAGCC
AGCATGACACAGTGAATTCTGCTCTGTAGTTGTCCAGTCTGCGGTGCCTTTGAGACATCCAAGAGGAGATGTCCCAA
GGGCAGCAGCTAAACATGTGAATTGGGGGCTGACAACAGAGATCTGAAGTGGAGATACCGATGACTGTTAGAGGCAG
CATTTAAAGCCATGTGCATGCGTCAACTTGTCTATTTATAAAGTACAAGGACCTGGTGATACATAGAGCGCTCTCCT
GAGCCTATACATTCCCCCTCCTAAGACCACAATTCCAGGTACCACTTAGTTCCTTCCTTCCCAAGTCACGGCTCACA
GGGGCCTCCATATCACCACCTTATTTCATATTCTCCCCCCCCAACATGTTGCCTTCTCCAACAACTCTTAAAATTCA
TAAAAACAGAAGATATAAGATACCACTACCCAGGCACTAAAATGCCTAAAAAACAAAACAAAACGCACCAATGTGCT
ATCACTCACATGTGGAATCTTTTTTTTTTTTTTGGCTTTATTTAGGGCTGCACCCAGGCGGCATATGGAGGAGGTTC
CCAGGTTAGGGGTCTAATCAGAGCTGCAGCTGCCGGCCTACACCACGGCCACAGCATCATCAGATCTGAGCCGCATC
TGTGACCTACCCCACAGCTCACGGCAACGCCAGATCCTTAACCCACTGAGCGAGGCCAGGGATCGAACCCGCATCCT
CATGGATCCTAGTCGGATTCCTTTCCACTGCGCCATGACGGGAACCCCCGCATGTGGAATCTTTAAAAAAAAGGACA
CAATGAACTTCTTTACAGAACAGAAACTGACTCACAGACTTTGAAAAACTTTCAGTTTCCAAGGGAGACAGGTTGGG
GGTGGCGGGGTGGGTGAGGGTTTGGGATAGAGATACTATAAAATTGGGTTGTGATGATTGTTGTACAAATATAAATG
TAATAAAATTCATTGAGTTAAAAAAAAATGAACAGGAGTTCCCTTCATGGCTCAGTGATTAACAAACACGACTAGGA
TCTATGAGGATGCAGGTTCAATCCCTGGCCTTGCTCAGTGTATTAAGGATCTGGCGCTGTGGTGTAGGTCGCACACA
GAACTCGGATCCTGCGTGGCTGTGGCTGTGGCGCAGGCTGGCAGCTGTAGCTCTGACTGGACCCCTAGCCTGGGAAC
CTCTACATGCCGTGGGTGAGGCAAAAAATTAAAAAAAAAAAAGAATTAATTATAAAATAAATAAATAAATGAACAAA
TGTAGATGTTAAACACTTATCATGGAACACTCCTGGAAATAAAAGAAGATTAGAACTAAAAAAAAAAAATGGACAAT
ACGCAAACACTGTCGAGGATGTGGAATAATCGTGTTTTATACATTGCTGGGGAATCTAAAACGGTACACCCTATGAC
CCAACAATTTCAATCCTAGGTGATAACAAAGGTCCACAAAAGACTTCTACAAGAAATAATAGCCCAACTTAGAAATA
ACCCAAAGGTTCATCGAGACGAGAATAAATATGCAAATGATGGTATAGCCTTAGAATAGAATACTACTCAGCACTAA
AAAGAAAGACACAGATGAATTTCACAACATACACAACAACACAGGTGAGCTTCACAAACTATATATATATTACATGG
AGGGAAATAAGCCAGATACACAAGAGAAATACAGTGTGATTCCATTTATGTGAAGTCCAAGAGCAGGCAAAATTAAT
CAATGTTGAATAAAGTGAGAAAATGGTTGCTTGGAAGAGGCGAAGGAAAATTGATAGGAAATGGGAACTTTCCTAGG
ATGACGCAAAGATTTCATATCTTATTTCGGGTGGCCACTTCAAAGGTGCAAACAACAGCTAAAACTTGTGGAACCCA
ACCCTCACCACCTGCGTATTTTATTGTTTGGAAATTATACTTCAGTTAAAACATTAGGAAAAGAAAATAATTTTGTG
AAGTATCAATAAAATAACGAAAATGAAGAGACTCTAAAGGGCAAAAACACATTCAGTTCAAATATATAAATTATATT
TGTGCTATGTATGCATCTATACGAATGTCCAGCCCCCCTTAATGTAGCCCCCTTTCAGCCATTCTCCGCTCACCCTT
GCCCCCATCCTGATGGCCTCTGTCCATAGCCATTTTCTAGCTGTCATCAGAAATGATGCAGTGAAAGAGCAAAAGCC
TTAGAGCCAGATAGAGCTGCATTTAAATTCCAGCTGCTGAGCACCCATAATCGAGTTACTCGGCCTCTCTGAACGTT
CATTTCCTCAACTACAAAATGGGTTGATGAGACACAATCAACCCTGTTGGGCTGGACTAAGAGAGAGGCAGTGTGCT
GATTAGTTTCTGGGAAACCTAATTCTTTTGACCTCAGCCTGTGAAACCAACTTGGTTGTGCAAGGCCCACTGCCGGC
CTGGAAAAGCCCAGAGGATGAGACTCACGGGCTACTTCTCCCTGAAGGATAGGGAGGTGGTCCTGGGAACCCAGAGT
CTTTGTGGGCTGGTGCTAAGAGTCGAGTCGCTAACTCAGAGCCATCAGGGCCAGGAAAACCTATGACCTATGACAAA
GGAGACAAGTTTCCTGCCAAGGGTTGGCCACCTCAGGATCTTGCCCAAATCACTTTGCACACCCCTAGATTCCATTT
ATCCACCAAAAATGGCCAGAGGAGCCTGGATCTGAAGAATTTGATACTAAAAACAGCTTCTGGAATTCCCATAGTGG
CTCAGCAGAAACGAATCCGACTAGGAACCATGAGGTTGGGGGTTCGACCCCTGACCTCGCTCAGTGGGCTAAGGATC
CAGTGTGGCTGTGAGCTGTGGTGTAGGTCGCAGATGCAGTTTGGATCTGGCGTTGCTGTGGCTGTGGTGTAGGCCAG
AGGCTACAGCTCCGATTAGACCCCTAGCCTGGGAACCTCCATATGCCTCGTGTGTGGCCCTAAAAAGTCAAGAGTTA
AAAAAAAAAAAAGAGTTAAAAACAGCTACTATGTCTTGGGAGCATTGCGATGCAAGTTTGTTCTCAGCCAGGCACAG
GGTTAAGGGTCTGGCATTGCCACAGCTGCGGCTTCGGTGGCAACTACAGCTCGGATCTGATCCCTGGCCTGCTCCAT
GTGCTGCGGAGTGGTCAAAAAAAAAAAAAAAAAAAAAAAAAAAACCCAAACAAATAGCCTCTGGTGTTTCCCAATCT
ATAGAAGAGATCAAGGCAGGACCAAACTGGTTCTGTCCGAAAGAAGGAACGGAAGAGTCAGAGTCGGAGCCCTGCCG
GCTAGCTCCCCTCCTCCACCTTGGCGTTTCCTGAGCCAGGATCCTAGGTCTCCCAGGGGCAAAGTTTGAAATCTCCC
TGACCAGGTAAACCCTAGGGCCTCTTTTAGCTCAGTCTTATCCAGTCGTGGTGCATCTGTCAAGTGTAATAATAAAG
AGGATCTGCACCTGCCCCCCCACCCCATCTGGTAGGGGAGGCAAGGTGCACCCAGAAATAACTCCGAGCAAGGTACA
AAGTGCTTAGTGTAGCCAAAGAAGCACATAAGTCCAATAAAGCATCCACATTCCCCCCCCACCACACACACACACAC
ACAACCTCTTCGCACTTGGCATTTCCTTACTTCCAGCAGTCTCTCTATTTCAGGTTTGTGGAAACGGGTTCTCCCTG
GAAAAGGGTTTCCCAGCTAGGAGGCGGCCCGGCCCCGACTCCCCCTCTCCCCCACCACCCCCGGTCCCCGCACGTCC
AGCGCTCCGAGACCCACCCATTTCCAAGCACAAGAACAAGGCGACAAGGCCCGCTCAGGGGCCAAGAGGAGGGCAAA
CGACGACAAGCAAAGCCACAAAAGCAACCGTCCGGGTCTCTTGTCTTTCCTGGGGGGAGGAGCGGCGCCCGCAGACG
GTCTCCGCGCCTCCCTCCCTCCCGGGCCAGCGGGAAGATAGGGGAATCTCAAGTCGCTCTGCTTTCTCTCTTCGCGC
ACTGACATTTTCCCCCACTTTACTGTTTCTTGGACGCCTTTCAAGAGTTTGTGCAACCAGTCTGTTTAGCTGCTTTT
CTGCCATTTTCAAACGCGGGGTGGTGTCCCTTTCGAGTGGGAACGTGGTGGCTTAAAGTCTGGAAGGGACCCCTTCG
CCTCCCGTCACCCCGCTGCAGCGGGCCTCTTCGCCGCCAAAGTTTCGGCGTTCCAAAGTTTCCCCCGGCCGGGTTTC
GGGCTCGGTCCTCCGCTCTCTGAGCTCCCCGACTTCTCCCTCTCTGTGCGCTCAGGGGTTTCTGTGCCCCTCACTTC
ACTCTCAGGTTCCCTCTTGCGGAGGCATCCTCTTCCCACCTAGTCCCGGGCGAGGGAGGCCTCCGCCTCCCCTGCCC
CACATTGGGAGACAGACCCCTCCCTCCTTTCGAGACTTCCCGGGCAGTCCTCCTCCTCTGCGCGCCCCGAGCCTCCC
CTCTCCCGCCTCCATCCGGCGGACCCCGTGGAAGCCCGCAGCCCCTCAGGCCCGACAAGATGGGGACAGAGACGGGG
TCAGAGTTGAGCACAGAGGTAACGACGAGAACAAAAGCGGGGACACGGCAGGGCAGCAACAGGGCAGGGCCGGCGCG
GTGGCCTGTCCTCTCCCCGCGCTGCCTCCACGGCGCCCGCAGCCCCGGGCCGGGCGGGACTCGCGGCCTCCAGGGGC
TCGGGCAGCGCCCAGCGGGACCCACCTGATCGGCAGAAGCTGGGTGCGCTCGGGGATGGCCCACACCTCGGCTCCCG
GCCCCCCGGCGGCGTCCTCGGCTGAGGGAACAGTGGCGCGCGGCGTGCTCCTGAGCTCGGCAGGGCGTGCCGGGGCG
GGGTGTGCCGCCTGCGCTCCGGCCCGCCGGCCGCTGTGTGCTCCTCCGGGGTGGCGGGCAGGGGCGCGAGGAAGCCG
GCGGGCACTGGGCGGCGGGCGGCGAGCTCCCCGCTCCACCCGGCCCGCGGCTGTTTGTGCAGAGCGGGTCCCGCCCC
AGACACGGCCGCTAGGAGGCCGAGGGCGCGAGTGCGCGAGTGCCGGTGCGCGTGTGTGTCTGGTGGCCGGGAGGCGC
AGGGGGTGTTTGTTTCATTTTCACTCAGGCAGAAAAAAGCCTGAAACCAGCAAAAAAAGAAAAGAAATTCCCTGGTG
AGGGTGGCTGGGCCTCTTTGCCTTCTCCGGCCTGCACGTGGTGGGGGTGGAGGGACCCGGAGGGTGGGGTGGGGTCT
ATCACCCAGTACTGCAGGGAGGGGCCCCGGAG

| | |
|---|---|
| SEQ ID NO: 12 | GGTA1 cDNA Sequence |

ATGAATGTCAAAGGAAGAGTGGTTCTGTCAATGCTGCTTGTCTCAACTGTAATGGTTGTGTTTTGGGAATACATCAA
CAGCCCAGAAGGTTCTTTGTTCTGGATATACCAGTCAAAAAACCCAGAAGTTGGCAGCAGTGCTCAGAGGGGCTGGT
GGTTTCCGAGCTGGTTTAACAATGGGACTCACAGTTACCACGAAGAAGAAGACGCTATAGGCAACGAAAAGGAACAA
AGAAAAGAAGACAACAGAGGAGAGCTTCCGCTAGTGGACTGGTTTAATCCTGAGAAACGCCCAGAGGTCGTGACCAT
AACCAGATGGAAGGCTCCAGTGGTATGGGAAGGCACTTACAACAGAGCCGTCTTAGATAATTATTATGCCAAACAGA
AAATTACCGTGGGCTTGACGGTTTTTGCTGTCGGAAGATACATTGAGCATTACTTGGAGGAGTTCTTAATATCTGCA
AATACATACTTCATGGTTGGCCACAAAGTCATCTTTTACATCATGGTGGATGATATCTCCAGGATGCCTTTGATAGA
GCTGGGTCCTCTGCGTTCCTTTAAAGTGTTTGAGATCAAGTCCGAGAAGAGGTGGCAAGACATCAGCATGATGCGCA
TGAAGACCATCGGGGAGCACATCCTGGCCCACATCCAGCACGAGGTGGACTTCCTCTTCTGCATGGACGTGGATCAG
GTCTTCCAAAACAACTTTGGGGTGGAGACCCTGGGCCAGTCGGTGGCTCAGCTACAGGCCTGGTGGTACAAGGCACA
TCCTGACGAGTTCACCTACGAGAGGCGGAAGGAGTCCGCAGCCTACATTCCGTTTGGCCAGGGGGATTTTTATTACC
ACGCAGCCATTTTTGGGGGAACACCCACTCAGGTTCTAAACATCACTCAGGAGTGCTTCAAGGGAATCCTCCAGGAC
AAGGAAAATGACATAGAAGCCGAGTGGCATGATGAAAGCCATCTAAACAAGTATTTCCTTCTCAACAAACCCACTAA
AATCTTATCCCCAGAATACTGCTGGGATTATCATATAGGCATGTCTGTGGATATTAGGATTGTCAAGATAGCTTGGC
AGAAAAAAGAGTATAATTTGGTTAGAAATAACATCTGA

| | |
|---|---|
| SEQ ID NO: 13 | GGTA1 Protein Sequence |

MNVKGRVVLSMLLVSTVMVVFWEYINSPEGSLFWIYQSKNPEVGSSAQRGWWFPSWFNNGTHSYHEEEDAIGNEKEQ
RKEDNRGELPLVDWFNPEKRPEVVTITRWKAPVVWEGTYNRAVLDNYYAKQKITVGLTVFAVGRYIEHYLEEFLISA
NTYFMVGHKVIFYIMVDDISRMPLIELGPLRSFKVFEIKSEKRWQDISMMRMKTIGEHILAHIQHEVDFLFCMDVDQ
VFQNNFGVETLGQSVAQLQAWWYKAHPDEFTYERRKESAAYIPFGQGDFYYHAAIFGGTPTQVLNITQECFKGILQD
KENDIEAEWHDESHLNKYFLLNKPTKILSPEYCWDYHIGMSVDIRIVKIAWQKKEYNLVRNNI

| | |
|---|---|
| SEQ ID NO: 14 | CMAH Genomic Sequence |

CTACCCAGAGCACATCAGGAAGGACTTCCAGTCAGGTGGTGTGAGGGGGAGTTTTATTTGAAAATGATTCCAAAACC
TGTAAGAGATAAAGTAGAAAAACATGTTTTGGAAACTTCCATGCCTGCTGTATTTGCCAAAATCTGTTCAGTACCTG
GTACTCAGCTTTCCCTGAAAGATAGCGTTTCTGTACTGTTTCAGATGTTCATTTAACTTAGCATTTTTGATACAGAA
TGCAGTCCTTAAACATGACAATTGTGTCTTCCTTCTATTTTTCTGTGACATGCCTTGCTTTAAGGAATTCTTGTATG
TAAAAATATAGAATCTGTACACAAAAACATTAGGACCTAGTATTGGTGAGAGGGCAAGTAAATGGGTTATATGTTAT
TTCTGAGAAGGCGAGTTGGCTTCCTGAAGATCAGTCTGGCAGAGTATAGATTATTCTAAGAAATCATTATGAATTTA
TCCTAAGAAATTTATCCTAAGAAATCATTATGAAAGTGTGCAAGACACACCTACATATTTCTTTGCCAAAACATCAT
TTCAAATAATGAAAAGTTAGAAACTTACAGGGTAGATCAAAGACTGTTCAGTAATCATGCAGGTGTACAGACGTATG
TATAGTATTATCCCATTTTCATTTTTTGAAAAAGTGCTTGTGGTATATGTGCTTGTAAACAGAAAAAGAAAGATGAA
CTAGACACCAAAGTACAAATTGCTCTCTGGATGGTGGGATCATTTGTGGTTTAACTGTTTTTTGAATTTAAAAGTTT
TTTTTTTTCCAAATTTTCTGCGGTAGATCTGTGTTATTTTTATGATCAGAAAAATATTTAGTAAACTAAATCTCATT
TTAAAAGCAACAAAGATATATTGGGCTATGACTGCTTCCCAAGATTCATCACAGGATCCTTTCACATTTATGAACTT
TGCTATCAAAACAGTATATAGAAAAATAGTCTTCAGAATCAATAGCCCAGAAGTTTCCAAGATGTAATTTTTTTTAA
AAGAAAAGTTATCTTTGAATCTTTCTCACTCAAATTTGCTCCATTTCCTTTTTTCCAGAACAGAAGTCAGCTACGAA
CTCTGTTGAAAATGAACAAAATGTTTTCATTTTGCTTTACAAATGAAATGGTTTCCAAATGGAATGTTTTACAGACA
TTAAAATAGTTGAGGTTGGAGTTCCCATCATGACTCAGTGGTTAATGAACATGACTAGGATCCATGAGGATGTGTGT
TCGATCCCTGGCCTCGTTCAGTGGTTAAGGATCCGGTGTTGCCATGAGCTGTGCTTGTAGGTCACAGACACGGCTTG
GATCTGACGTTGCTATGGCTATGACGTAGGCTGGTGGCTACAGCTCTGATTAGACTCCTAGCTTGGGAACGTCCATA
TGCTGCAGGTGTGGCCCTAGAAAGACAAAAAGACAAAAAAAAAAACCCAAAAACTGAGGTTGACCTGTGTGTCCCAA
CACTAGAAATACCAAAGATATTAATGAATAAAAAATGCAAATTACAGATGTACCAGGATTACATTAAAAAAAAAAAC
AAAACAAAACCCAGGAATGATAACCTCCCCTCCTCAACTATAAGGGATGTTTTATTGAGAAAAAATACATTTCTTGA
AATGCTGATATGCTCAAAAATAGGCCTGGGGTGATACAACTATGCTGTTACCAAGTGTTACCCTGGAGAGTGGGTGG
AGAAAGGCAGGAAACAGGGTTTTGTGGGAGGTGTGGGGTTATTTCCTTTTTATTTTATATAATTCTACATTCTTTAA
ATATTTTTAAAGCAATTTCAAGATATTCAAAAAGAAATCTATAAAGAAGAAATGTCAAGACAGGCCTGTGCGTGCAA
GCTCATGGCAGAAGCGGGGTAGGAGGCTTGCCTGCTTCAGACTAAATTCCTGACCTTTTCAGAGGGTCAGTGGTCAT
GAAAGAATGCATTCTCCCCTCTTGCTGATTATTTTGCAAATACAAAAATGGCAAATGGGGCTTTCCAGCATTTCAGC
ACAAATATTCCAACTAAAGCCCTAAGGACCTATACGGTTTTGCTATGAGAAACTTACGTGGTTTTTGAAGCTCAACC
AGGGAGAAACTTGGAGGATCATCCCCTTAACCAACTAGTTCACCAAATTCATGCTCAGAGTTGGGCAACATGGGAGA
TGAATGTCTTCCAGGATCACAACTTTGCCATATCACCCCATCCTCATTCTTGTCATAGTGATTCTTAGTAATTTTGC
AGTGTCTTCAGATAAATTCTGAGGAGTGGAGCTGCTGGATCCAAACACACCCTCTCCCTTTCATAATGTCCTTCCCT
TCCCTGTACTCTAAACTACTTGTATACAGGATTGAAGCACATGGGCATGAATGTCCAAATGGTGACTCTTTGAAAGT
TATCTTCCTAACCAGATTTGCCTTTCAAGGTTAACAAAGAAAAAAGCTCTAACGGTGGAATCTCCATGGCCATCAAC
ACTGCAGGGCACAGTCAGTCACTGACTCTGCTTATATAGCCCTGGCCTCCTCTGCAGCAGCCTAGGGCACACACGAC
AGGCATTTTCGGACTTACAGATGATGGTATATATCAGGATCCCGCTGAAGCCGGGTTTGGAATCCTATGTACAAGTC
ATCCCAGAGCAGACCATTCTTTACCACGTGTCTGATGACATCAACCCGGCTCCGAATCTGAAACAGAGGAGGAATCA
CGAGTTAGGCGCAACCCAGCCAGTAGAGAGTGTCAGTATGGACCCCTCGTGTCCCGGAGAGAAGCAGCTGCCTGTAA
GGGCAGGGATGGAGGAATCAAGGAGAAAAGCCTACTGAAGCAGATCTCACAGGCCGAGGGGGAGAGGGGCCCCTGAG
TGCAGCAGAAATCGAGGGATGGAAACAGGAAGTGGATCAGGAGCTGGGGGTGCAGAGTGGCAGAGAGTACAGACAGA
GTTGGATGGCTGGGTATGAACCCCCAATATAGCTGTGTGACCTTGGCAACCATTCTGTGCCTCAAGTTCCTCATCTA
TACAGTGGAGGTAATAGAACATTCCTCCTGGGGCTGTTGTGAGGATTACCTGAGCCAGTGTACTTAAAATACTGAAA
ACAAGGCCTGCCACAGAGCAAGATTACCTTAATTCGGTGGTCAAGGCCCTTACCTTCAAAGAATCCCAACTCCTGAC
ACAGGATCTGTTGAATAGTCAGAGGTGCACAGGGTTAGGAGACAAGCAGAGATGGTTTTGAGTTTCAGCCCAGCACT
TACTAATCATGTGACCTTAACCTTGCTAAGCCTCGGTCTCCTCTGTGACTGTTGTGAGAAAAAAAAAAAGAGATAAT
TCATAAAAAAAAAAAAAAAAAAGAGCATGAAGTAGCATGAAGGGAAGTCACTCTAAGATTGGACTGGCTTCAACATT
TTATCGGTACCCATGTTCATGTTTACCAGGAGCTTTTCAGTATCTGGCATCATATTTTTTTTTTCCTGAGAAGTATT
GTGCTAATGCCAGTAGAGGAAACTTTATCATAAATGACAGGCTATTAAATGACATAGAATGATCAGGAGTTTGGCAT
TAGGGATTTACTTCTTTTTCGTTCACCATTCCTATAAAACAATTACATCCACTGTGATCTGAGATCGCAACACAGGT
CAAAGGCACTCTCATTTTGCCAGTAGAGATTTAGAAACACTGCACAGTTTGTCAGGTCGAGGACTGCCCAGCTCAGG
GGCAGTATCAAGATCTATTTCCTCACAGTGGAGGGAAGATGGCCTTTCTTGACCTTTCAATATAGAGGAGAGCACGT
GGAAGAACTAGGGGATGTTTTGAGCAACATTTAGGGTGTAAACTGGGAAGGGCTTGGAGACTCATTAGGTTTAGGGA
TGGAGAAGGAAAGATTGAAGATTAAGCCCTTGTTTCTAGCTTGGCTCACTGCTGGGGGTAGGGGAAAGGCATGGATG
TTGCCAATAATCAAGATGGAAAAGGAGAAAGAACAGTTGTAAGAGGATTTTGAACACGCTGAAAGTGAGATACCAAA
GGACTTAGACATCCAGGGAATGATATCTCTGGGGGGATTAGCTCTACATCTAAAGCTGGACAGTGTTGGAGAGAGGT
GGGCAAAGGCCGGGCAGGACCTATGGATTTTTGGAGTCTTTAGCAGAGAAGTGGTGCCAGCAGATGTGTTCACCCAG
CCACAGATTTAAGAAGAAGAGTGGGTTGAGCACGGAACCCCGGGAAAAGAAGAGATTTAGGTGGTGGCTGGAGAAAG
AGATATCTTGGAAGGATGCAGAGGAAGAAGAGTCAGGAAGTAAAGGAGATGAGGACTTGTCTCTGGGCTGAGAAAGG
ACTTCTAGTTCAAAATGATGGACCGCTCTCGTGCATAACCCATGCACATCTTCCAGACTCAACTGAAGTGTTGACAA
AACAACTGTACTGGGCTGAACTGCCTCAGAGAAGAAGAAATGAAGTGAGTCACTGACGGCAGTAGATTTGGACTAAC
TAATGTGAATCTGGAAAGCTGGCAGGTAAGAGGTGTCTGAGGAACAGGGCAGAGGCTGCAGAATCCCAGAGAGTCTG
TGGGGGGACATTCAGATGCAGGAGGAGGAGAGGTAGGTATCCTGGACGACAGCAGGGACACACAGCACAAAACGATG
CCATGAAACCGTGGACCCCTTCCCTATGCCTCAGCACGGCTCTGGGCCAAATGCATTCAGACAGTGCACTGAAGAAA
TGGGATCAATTTTGTAGGAAAAGTGTTTGAATGAGACCAGGGAGTGTACTTGTGATGCCCCAGAGCAAGGACCTCCC
CGTCTCAGTATTTAGGGGTCCCTCAGCCCAATAGCTGAACGCTCAACTACACAGCTTAAACTGATGACCCCTTGTCC
AAATACAACCTAGATCTTAGTTCATTGCCTATAGTCCCTTTAAAAAAAAATGAATTAGCTTTCCACATCTATAAATC
TGGGTATTACATATGAAAAATCCAGATTTCTGAGTTTTCTAGAAAATTCAGAAGTACAGCTGGAGCTCAGTAAGGGC
CACTCCCTTCCCATCTGGCATTTCCTGGCCACATGACACGGTCCCCACCCAGCTCCACCCAATTATGAGATCTTTCT
GTGGTCCGTTTATGAGCACTTGAGGATATGACCCCTGCCTTCAAGTAAAGCCTGCTGGATAACCACTCCAAACATAT
ACAGAAAGCCCTACCTCAGCTTGAAAAGGTCTTTGTTGTTGTTGTTGTAGATATAGATTAATCCCTTAATTCTTAAA
AGTCACCTACAGTGGAAGAAAGATCAGCCTGGGATAAGCAACACTGCATGCAACTAGAAGCCAAAGGAGCAACGCCT
TCGGGTGTCCATGGAAAGTAACAGCCACCCAGCATCATGGGCTCAGCCAAGCTATCGTGCAAGACCAGGCAGGAAAG
TACCTCCAGTTTAGCTCACGTGCAAATTTTCTTCCTCAGATTCTTAAGCAGAAGGTTCCACAAAGGAGGAAAGCGAA
GAAAGTGAAGCCATGGTGGGGTCTGGAAGTGGGTCAAGGATGTCTCTGGGTGGCAGATTGGCGGCAGACCCAGAGAG
GAGCCCACCCAAATTGGAGCAGGAGGATGGAGAACTCCAGGAGCCATGCGTCTAAGGAAGATGGAGACTTGTGTACT
AGAAAATATATTTATGAGTTTGAAAGGCAATTCACGTCCCTCCTCAAAAAGGGAATATGAGAAGGCTCCAGGTAGCA
AGAAAAGAGCTCTTCCAAGTACCGGCATAACCTCTTTAAACAAACCTCAACAACTAGAAATCTCACAAAATTCCTGG
GCAATAAAAGCACTGAGAGTCAAAGTAAGGACCACCATGTACGTGACAGGCATGATGCTTTGCCCCAGGGTGTATCA
AGTCTGCAAGAGAGCTGTGGCTTACTTTATCCTACAGATGTATTATCAAAAGCTATGGAAAAGTGACTTACTTTCAA
TGAAACATTTTATAGGAACTCGTGGTTTTAAAAATTCCAAAGATTATGGTTAACAGATAATTTAGAAGTTTTATAAA
TTTAAATTTGAAAGTAAAACAGTGGCTAAATACACAGACTCTGGAGATAGACTGCGTGTGGTCAAACCCCTGCACCA
TGATTTACTTGCTATAAGACCTCGGGAAAGTTATTTAATCTCTTGGTTAAATATGGCATTTTCCTTATCTGTAAATG
GGAAGTACAGTAATATCTGTTCATAAGGTGGCTGCTGTATTAAATGACTTAATATTTATGAAGCTGAGCTTGGCAAG
AGCAAGTTATCATGTATTTGGTGAACAAACCAAGACATTTATGATTCTTTTTTTTTTTTCTTTTTATTTTTAACAGC
CGAATCTGTGGCATATTCTGGGCTGTGGAAGTTTCTGGGCTAGGAGATGAATCGGAGCTGCAGTTTGTGGCAACACC
AGATCCTTAACCCATCGAGTGAGGCCAGGGATCAAACTCACATTCTCATAGAGACAATGTCAGGTCCTTAACCAGTT
GAGGCACAACAGGAACTCCTTATCAGATGCATTTTGCTCTAAATGAGTGTTTCACACAGGGTGTTCCTGTGTGTGAA
AACCCAGGGATTTTTTTTAACTCAGAAAGCTGGCAGTGGATTATTGGTTTCACTGAACTTTTGGCATAGGCTTTTCT
TCAACAGCAAGTGCTAACATACCAATGATTAAAATGTAGTTTAGGAACACATCTATTATAGGAAGCTACATTTACAC
CTCTACAATTAAGTCGCCACACATTCATGTGACACATGTAATATGCTTAAAGGTGGACTATATATCCTCCTAATTTA
TTTAGTGATTCATTTATATAGAATTAAAAATTACAATGTATGCTCACATATATCATGTCATTTGACTGTCATAAAAA
AAACTGATAAGGTGGCAAGAAGCTCAATAGAATGGAAAAAAACAACCTTTGGACAGGGATTCAAAGCCTCATTATTG
GTTATCTGAATCAGTCGGGGTGAGGCACCCTTCTTGGTCTTGACCTTGTGTCCAAAGCCCTAGTTCTTAACATCATG
CCTCTCTGCCGTAGGTGAGGGATTTGCTCAAAATTGGAGCTCAACAAAATATGTGTTGGTTTATGTTGACTTAACTC
CCTTTCCAGAGCCACACTGGGTTTGTTTGGGGAAGGAGACACCACTGGAGAGAAGGCAAGGAGGGCAGAGATCAGTG
CTTGCAGGTCTGAGAACAGCATAAGCAGGCCAGCTGTTTGGAAGGAAGCAGGTCAAGAAGCCAGTCTTTGCAAATGA
CTCAAAAAGAAGCAAGTACGGAGTTAATAGTAATGTTTCAGTATCAGAGTATTGGTTGTAACAAATGTACCCCAGTA
AAGTAAGATATTAACAATAATTTGGAGTTCCCATTGTGGCAAAGCGGAAACGAATCCAACTAGGAACCACGAGGATG
CAGGTTCAATCCCTGGCCTTGCTCAGTGGGTTAAGAATCCAGCTGTGAGCTTTGGTGTAGGTCACAGACGTGGCCCA
GATCCTGCATTGCTGTGGCTATGGCACAGACTGGCAGCTGTAGCTCCAGTTCAACCCCTAGACTGGGAACCTCCATA
TGCCACAGGTGTGGTCATAAAAAGCAAAAAAAAATTTATATATATATATAAACACTACTGTCTGTAATATCCTTGCA
ACTTTTCTGTAACTCTAAAGTTGTTCCAAAATAAAAAAGTTTATTTAGGAAGGAAGGAAGAAAGGGGCACTTCCACT
GGTATTCCTGCTTACTTCCTCATATGGATGTTCCCGGCTTGGTCTTTCTTTTGGAAAGGATAAATCCAGAAAGTCAA
CCAAATAGTCATATCCTCCAGGCAAAGGGCTGAAGTCCTCATCTGTCTCAATCATCTGTTCAAATGACAACATGGTA
AAGGGAAGAAGCATATCAATCTGGCGGTCAAGGTCCTTAGAAAATTCTAGAATGTGCAAGACCCAAGTGCCCTTAAA
TGATAGCAATGAAGCAGAATTAATACAAAAACTGTCTCTCCTCTTTGCTCTCTCCCACTGCCCCATCCCTCTACCCA
TCCCTCTCCCTCCCTCCCTCTCTTCTTTCTTGAACTGAATTCAAATCCTAGCCTTCTACACTAGCAAAACCACTTCA
TAACACTAACTTAAATAAAATTTATAGAGAAAATTATCATTATCTTAGTAATGAGATATCAAATTGGCTAAAAAATA
ATAAAATGTGGACTGTTTCTCATCATCACATAGTAGCTAAATATAAAAGAGTATCATTAGGAGTTCCCGTCGTGGCG
CAGTGGTTAACGAATCCGACTAGGAACCATGAGGTTGCGGGTTCGGTCCCTGCCCTTGCTCAGTGGGTTAACGATCC
GGCATTGCCGTGAGCTGTGGTGTAGGCTGCAGATGCGGCTTGGATCCCGTGTTGCTGTGGCTCTGGCGTGGGCCGGT
GGCTAAAGCTCCGATTCGACCCCTGGCCTGGGAACCTCCATATGCTGCAGAAGCGGCCCAAAGAAATAGCAAAAAGA
CCAAAAAACAAAAAAAATTCTTCCACCTACTATCCTTTTATTTTATGAAAGGAAAGATGTTTTCACACCTCAAAAAT
AGAAAGGACCTAATCTTGGAATAATGACAATTCGTCCAAAGGAAAGAGAGTTGACATCTTGGTGACCATACTCAGAT
GTGTGCTCATACTTATTTCGTTACTGACCAGCAAAAACTTTGTCACAGACTGTCACTGACCCCCAGGTTGAATTTTA
GGATTCATTGATTTTGAGGATGGCAAGTGTTGCCTGGTACCCAGTACTAATGTTCAGGGGTTGAAATTTAAACTTGG
AAATAGTCTTTACCCTGGAGGTAACTGATCTTTGTTCCTAAGGGTATGAATACTGTGCATTTCCCGATGCTTTCCCT
AAACTTTGCTCTCCAGGCACACATTCAGGCACTAAATATAAGTAGGATAAAATATAAGTATGGCAGGGATTCCCAGA
CCATTTTAGGCCTCCTCTTTCTCTTGCATCCCGCTGCCTGTTGCTACTTATTTTGCTTTTGTGGACATCCTCAGTTT
CAGTGACCAGCTTATAAGCTGAACCACTTAGCTGGTGAGCTCTGTGTGTCTATGTCAGGGCTAACTTAAGTTCTAGA
TCTAGGCTTACTTCCCAGTTGGTGCAATTCAGTCCTTACCCAGCTGCAGTCCTTACCTTACCTGCTTCCAGGCTGCT
ACAGGACACCAGCTCTGCAGTGGAGCCACCTGTCTGTCCCACAATTTATTTATTTTTTATTTTTTTATTTTTTTGCC
TCTTAAGGCCACACCTGCAGCATATGGATGTTCCCAGGCTAGGGGTTGAATCGGAGCTTCAGCTGCCAGCCTACGCC
ACAGCCACAGCAATGCAGGATCTGGGCTGCATCTGCGACCTACATCACAGCTGACAGCAACGCTGGATTCTTAACCC
ACTGAGCAAGGCCAGGGATCGAACCTACATCCTCATGGATCCTAGCTGGGTTTGTTAACTGCTGAGCCATGAAGGGA
ACTCCCCGTTTCACAGTTTATTTTACTTATTTATTTATTTATTTATTTATTTTGTCTTTTTGCTATTTCTTTGGGCC
GCTCCTGCGGCATATGGAGGTTCCCAGGCTAGGGGTCTAATCGGAGCTGTAGCCGCTGGCCTACGCTAGAGCCACAG
CAACGCGGGATCCGAGCCGCGTCTGCAACCTACACCACAGCTCACGGCAACGCCGGATCGTTAACCCACTGAGCAAG
GGCAGGGACCGAACCCGCAACCTCATGGTTCCTAGTCGGATTCGTTAACCACTGCGCCACGACGGGAACTCCCCCGT
TTCACAGTTTAAATAGCTGTCACTGCCATAACCAACACAACACAATACAACACCCACAAAAACCCAAAACAAACAAG
AACCAAGACACGGTGATGGAGGAAAAAGAATCCTCCAAAAGAAAAACAGAGCTGGATCTACATTTCATTCCCTACAT
TTTCAACATTCCCTACATTTTCAACAAAGGATTGTTTCAGCACATAGTCCAATACGCCCTCCGTCTGACAGTCAGTA
AGGCTCAATGAATGCTTATTGAGAAACCAACTGGAATACTAAGAGGTTTTCATATAGCTCTGTAATATAAGAAAACA
AAAACAAATAATAACTTCATAGCATACCCTGACCACCAGGTTATAATCCTTAAATCCAGCCCAAGTGAAGTATTCTT
TTATCCAGGATGAGTGACGAAATATTTCATCTCCTATAGCAGCATTCAAGATATTCAAATATGGGCCAAAATCCCAG
GAATCCTTGTAAATCTTAGTCCCTTCTGGAGGCTCTACGATGCCCTTGCTTAAAGACACAAAGGGGAGAGAACAATG
AAAAAAGAAAGCAACAAATAAGGAAGGCAGAAGTTTGCACTTCTACATCAACAGTCAACTGGATGAGCAGCTCTAAG
GCTGCTCAGATAGATGATGCCCAGGGGTCCCACAGATGTGCCTCAGGGAACATTGAGGAGTAGGGCCCCACCCCAGC
CTAAACCAGGTCAGCTCCTGTTAATTGCTTAGTGTGATAGCTCTCCAAGTCAGAATACATTTAAAGACGAAGTCTGG
AGTTCCCGTTGTGGCTCAGAGGGTGAAGAACATGACATAGTGTTCATAAGGAGACGGGTTCCATCCCTGGCCTCATT
CAGTGGGTTCAGAATCTGGTGTTACCTCAGCTGCGGTGTATGTCACAGATGCAGCTCAGATCCCACCTTGCTGTGGC
TGTGGTGTAGACCAGGCAGCTGCAACTCCCATTCAACCCCTGGCCTGGGAACTTCCATATGCCGCAGGTCTGGCCGC
AAAAAAGAAAAAAAAAAAAAAGATAAAGATCCATGTCCGGGGAAAAAAAAAGTTGGAATACCACGGATGTGGACCCT
TTGGGCTCAAATAACTAAATTATGAAAATGTTGAATATAAGTGGTCTTACTGATTTTGTGGACATCCGCTTATTCCT
GCCCTGCCCCCACCTCCATTAGACTACAAGTATGATGAAAGCAGCAACCATGACAGTACACAGAAGGGGTCCCATAA
ATATTTGTTGTACATAGGAATAACTCTAGCCTATCTTTGAGCTACACCTAGAATTTTGTGTCTCTCATATACAGCCC
TCTTATTATACTAATAATACCACAGCTGATAGACAGATGGGCTGACAGGAGACCCAGTCAGCAGTATGGACAAGAGT
GTGCTCTGACATCCCTAGAGCTGTCCATCCAGTGTGAAGATGGATCACTGCATGCAAGGTGGAATCTTGAGTCCTGG
CAATAGAATAGGACGTGATCTGGAGAAAGGAAATATGAGGAGGGAAATAGGCATCTGTGTAGTAAAGATTTGGCAGG
TAATGGTAGGTCCCTACATTCCACTTCTCCAAACACTGTTGGCCCAAAGCCGGAGATGCACTGGTTTTGGTGATAAA
TTATGTGTCAGATCCTAAAATGTCTAACTTCTAAATGAATCTCATATCTGCTTCTCTAAATCCTTGCTCCATCTCAG
CCAGCAGCCTCACTTATCTCCTCCTGGAAAAAAGCACAGTCTCCCAGCTGGCCCCCCTGACTCTAGGAGTTCTTCCC
CAGGACATGGTTTTTCTAAAACACAATGCAGTAATATTCCTTCTTTGCTTTATCGCTTTCTCAAGCTCTCCTTACTC
ACAGGCAAGTTCCTTGCCCTCCAGGCAAGGTCTTATAAGGACTTTCTGACCCTGGTCCAACACGGCATCCCTGTCTC
ATCCTTTTCCTTTACCTTCATTTACTGAAGGGGATGAATGACTTCATAAGGGAAGGACCTCTTCACAGCTGTTTCCC
CTGTACTTAGCATGATGCCCAAAGGAGCTCAATAAATCATTTCTGGAAGAATGGCATACATCTATGCACTTATTCAA
AGTAATTGTACTCACTAAGAGCATTGTAAATCAACTATATTTCAATAAAAATATTAAAAACTCAAAGTATCTGCACT
CACCAAACCTATGACATTATTTTCACCCCCTTTCTCCAGCATATCCCTCTGACTGGAACCTCAATCTCTTAATCACT
CTATTGGTAACCTTCTCCTGACCTCTAAGACATAGCTCAAATGCCTAAGATTGGAGGTTGAGCATTCCCTGTCCACA
TCTCCTGTTCTCTCTAGCCCTCTCCCTACCTCACAAGGCAGAGCTGAGCACTCAGTCTCCCGGAATCTCTTATACTT
TGTCTTACTACTGAGAACCTAACATCAACTCTCATTACCCAGAATGCTTTGGTGTGACACAATGATGCATATGCAGA
TTCCAGGGCTCTGCTTCAGATCTACTGAATCAGAATCTCAGGGGGTGGAGCCCAGGGAGCTGCATTTACCCAGTTTC
CTTGGGTTACTCTGACGCTCACTCTAGTTTGCGAATTTCTACCATAGGATGCGTCTGGGGAACTAGAGAGGGATAAT
GGAGAGAGTTCAGCAAATGCCAGGTGCCAGACTCTTGAATTCCCCACTAAAACGTGAAATAATTAAAATCTTCTCTC
ACCTTGAACTAGAGAATGAAAACTGCCTTTATCCTAGAGGCACTGGAGAGATCCTATGGAATTTTAAACAGGGAAGG
GAACGGGAAGAGTTTTGCACTTAAAAATCATTTCTTTGGCAGCAGTGCAGAGTTGGAGCTTTCAAACTTCTTGCCTA
AGATCCCAGGAAGAATATATTTTACATCAGGACTCTAGGGGTCCATATGCCAAGAGTATCTGTGAAACCAGAGTTTC
CTGAAATAATACTTACCCTTGTTATATGTGCTCAGGCAACATACTCAGGGTTGTTCTATACAATTTTGTTCTACTTC
TTTTTATTTTATTTTATTTTTGTCTTTTTTTTTTTTTTTTTTTTTTTTTTTTTTTTTTAGGGCTGCACTTGCAGCAT
ATGGAGGCTCCCAGGATAGGGGTCTAATTGGAGCTGATGCTGCAGGCCTACGCCAGAGCCACAGCAATGCCGGATCA
GAGCCACGTCTGTGACTTACAAAACAGCCCACAGCAATGCCGGATCCTTAACCCACTGAACAAGGCCAGGGATTGAA
CCCGCAACCTTATGGTTCCTAGTCGGATTTATTTCTGCTGTGCCACGACGGGAACGCCTATTTCCTTTTTCTAAATG
CTAGTTGTGATGCCATTGATTTCCTAACCCATCAATGAATCGTGACCAGCAGATTGAAAAAGGCTGGCATGGAGGAT
GGATCAGAGGACAGCGGGGCTGGGAGCACAGAGGCAAGTCAGGGGCCACTGCCAGAATTCTGGTTAAAAAAAAATTG
TGAGAGGCTGAATCAAGGCCACAGCAGAAGAGGCTGGAGGTGAGTGATGGATTTTTAAGAGATTTGTGAAGGAGAAT
TGACCAGATTTGAGCTGTGGGAAGTTAGTAAAAGGGTATAATCAGCTGACTGTGTCCCAGACCCCAGCTTTGCAAAG
GTAAGGCCAGGAGAAGGGTGTGCTTTTGGTAACCGTGTGCCCTGATCTCCAACAGAGTCACAGTCCACTTCTAAATA
ATGGTGAGGAATGATGGTTCCATCCGGCTCAAGACAAGTACTTATAAAAATACAGGTCTGGAACATCCACATTAATG
TTTCTGAACTGTACTCCCAGGGCACCGTTAATTGTTCAAATGGACTGTCTGGGGATTGGCGAGGAGGTAATATTTAC
ACTGATAGGAACACTAACTCTCAGGCTTATTGCTTTCTACTTGCTGAAGACAACTTATTTTTGAGCTGTAATAATGG
CCCTTCATAAAAAAAACTTTCTCACTCTTTATCCTGAAGTAAGGTTCTGAGACAAGGAAAACATTTGAGTAATTATC
TTATTTATTTATTTTTTTTTCAAGGCCACACCCACAGCATATGGAAGTTCCCAGGCTAAGGGTCTAATCAGAGCTGG
AGCTGCTGGCCTATGCCACAGCCACAGTAACGTGGGATCTGAGCCGTGTCTGCCACCTACACCACAGCTCACGGCAA
TGCCAGATCCTTAACCCACTGAGGGGGGCCAGGAATCGAACCCGCATCCTCATCGATACTAGTCGGGTTTGTTATTG
CTGAGCCACTACGGGAACTCCTAATTATTTTATAGGATAAGAAAATTATTATATAGGACTGTGAAAAAACTCAGTCT
CCCCCCCACCCCAGAGTTGAAAGATACTTATTTAATAGTTTATTTTATACAGTAAGACTCCCACTTTAAAGGGTGGT
GTGTAGATCTTAATGCATGACAAGCTCAGGATGCTAGTCAAGAAAAACTTAATATTCCTACAAACAGGGACCTGCCA
AGAGGCCATAGGTATGCCCTTTATTTTCTCATAAACATGAAAAAATTCAGAAATCATTTTTGTTCCCTGTAAATATT
CAAGTCAAACCTGTCTGTTGGGTCCTTTAGCATCCTACCCAGATCAAGAGTGGCTCCAGGTCTTGGGGTCCAGGTTA
CCACCTCAGAATTCTTCTTGATAAGATTGTTGAGTTCATTTGGGTCATTTTTGATGTTTGTTTCCTTAATATACCTG
ACAAATAAGAGCATTCCCATGTAAGGCAGTTTATTTTCAGATGACATTCTTATTTGAACAATGACAGAATTATTTTT
TATTTCTTTGCATTCCTACTTCCCAATCCTTCTTTTCTTACCCCAGGAAAAATAAAGACTATACTTGAGCTAATGTC
CCTGACTAGGGAAGAGCTGTTAGTCAAAGAAGGTTGACTCTATACTTCGTTTTTTAGTATAAGCATATAGTGTTTGG
AATTGAAGTTAGATGTACAAGACTATTATACATAATTGGTAATAGCACACTCTTGTATTTAATTTTTTTTATTCATA
CTCTCTGTTTTCAGGCTGCTTGTTAAAATAAGCTCCAGACCCCTACTAATCATTCTTTCTCATTTCATGTTGTTTCA
CAGCTAAATCACTCATTCAGCATATATTAACTTATGCGTAAACACGTTATATAAAATATCCAGCCATACTTGTCTGC
TGGGTGGGATTCCACGAAATACCCAGCAAAGGGGCAGTAAATTCTGGGTTGTAGGTCCTTCACCAGCCGAGCCTTGT
AGTTCAGGAGTTTCTTCCTTTCTGTTTTAATGAATTGGGCTTTCCATTCCTCTGGAATGACAGGGTTTGGATTAGTC
TTCTCTGTTCAGAAATCACAGAAAAACAAAAGTTCTAGTAGATTAGAAGTCTTGCAAGAGATAAAAATTGACAGTTG
AGTGATGCAGAAGTAGAACAAAGCTCCTTGTCATTAGTGGCTTTATTTTGCAAAGTTGGTTACTAGGAAAATATCCC
AAACTAGTCAAAGACATTGAATCCCCTCTTTGTTTACGGCAATTCATTTGGATCCAACTGAAAACACAGGGCAGCAT
GCATAGTTGTACCCTGGGTGCATGCATATTTTAAGGGCACTGTCGATTAACTCTCTACTAACATGGGCATGGCTTTG
TTATTTTGGTGGAATATAAAAGTAAAGTATGTTCATTACACTCTGGAGATGCACAGTGGTCAAGAGCATGGATGTTG
GAGTCAGTCAAGATCAAAATGCAGCTCCACCACTTCAATTCTTTAAGTCTGTTTTTCTCCTCTGTTGAATGGAATCA
TGATGCCTACCTCACGTGTTGTTCATTTGTTCGTTTGCTCATTCTTTCATTTGATCGATATTTATTGAGCACCTACT
ATGTGCCAGACGTAGTTCTAGGCACTGAGAATACAGTGGCGAGCAAGATAAAGCAGGTCCCTGCTCTCATGGAGCAT
TCATTCTAGTGAAAGAAGCAAATAATGAATAAGTAAATAAGTTCATTTCAAAGAGTGATGAGCTAGGAAGAAAATAA
AACAGAGCCACCAAATAGAGAGTGGCTGGGGTAAGGATGAGGACGGGTGGGATGGAAGGGCATATTAGAAGGGTAGT
TAGTGAAGATGACATCTGGAATCATAGACCATAGACACAGACACAGAAGAGAAGTTGCTGACCACGTGGTGGTCAGG
GGCAATAGCACTCTAAGCAGTAGAAATAGCACATACAAAGACCCAGGGCATGGAGCTACATGGTGTACTGAGTCTGA
GGAACGAAAAACAAGCCAGTATGGACTTATGCTTGTCAAGCAATGGGGGTATGGGCAATAAAGGAAATTGAGAAATT
AGGCAGGGCCCAGAGCATGTATGGTACCATGTCAGGTACTCCTTCTACCATTACTGTTATGAAAATTTGATAAACAC
AAACAAGGATACAGGGGAAAAAATGTTACCTATAAGCTAGGTGTAACCACTATGAACATGTTAGTATATTACAGACC
TTTTAAAATGTATGTGCATGTGCACATACTCACACACATACACATACTCACATAAGAACTGAATTATGCTACCACCC
TTTAGTAGGTATGTTTTGCCTCCCTAGTCACACTGTTAACCCCATAAGGACAGCACCTTCCCTCATCTCTCACATGG
TGATGCATTCTGGGAGGCAATGAAATCAGACTTACAGAAAAAAGGAAGGAACTGGACAGGTTTTCTTCTTATTGCAA
GTAGGGCATTTTTGACACATTACTAAACAGAGATTACTTACTAAAAACATTAATTTATTAAGCAGACATATATTGAA
CACTTACAATGATAGTACTGAGCAAAGGTATGAAAAAAATATACCACTTAACCATCCTCCCCATCCCAGCCCCAGAA
CCACCCTTAGACACAGAGCAGAAGAGCTTCTGCCTTGGTCCCCACATTTTTTCTAGCTTTGAGATATAACTGACATC
TAGTATTACATAACTTTAAGGTGTACAACATGGTGATTTCATGACATGCATGTATGGCTAAATGATGACCACAATAA
AGTTAGTTAACACCGCCATCACCTCACATAATTACCATTTCTGTTTGTGTGCACGTGTGTGTGTGTGGTGTGTGTGT
GTGGTGTGTGTGTGTGTGTGTGTGTGTGTGTGTGTGTGGTTAGAACATGTAAGATCTACTCTCAGCAACTTCCAAGT
ATATAGTACAATATGCTATCTATAGTTGCCATGCTGTTTATTATACCCCTAGAATTTATTCATCTTGTAACTGGAAG
TTTATACTCTTTGACCACTATTTTCCCTACCACCCCCCCAACCTCTCGTAATCCCACACTTTAGAGGGGCTTCCTTA
GCCTCATCCCTCCCCCGTATGAGCTTTCCACGAGGTCAAGGGTATGTATCCCCCTCAGGCTGCCCACACTCTGTTCT
GAACCACATACAAAGAGCACTTAAGCCTGGATTACCAATGTCAGACTCTTTCTGATCAGCTCTATGTTCTATGTCAG
GAATCCATTTGATCCAAATTATTCTTGATTTTTCCTGAGATTCTCCCTAGTCTCCTTAGTGTTTCATGCTCCATCAG
CATATTCTCAGCTGGAAACTTTAGTCTATATTTGTGACTTGCAAGTATGATTTCCCAATAAGATTGCACACCTCTTG
TGAGGAAGAACCATGTCCTAATTATCTTTGTATTGATTCACACAGCATTTAGCAAAGTGCCATGCCAACTCCTTGGC
ATCATTTTGATATAAAGAATTACCAGTAAATTTTCCACCACTGAAAGTCATTGGAAAGCCTGAAGCTCCTCCAGCAA
AATCACTCATCATTAATGCAACCTTCATAGGCAGCCTTCCTCCATTGGGTCTGGTGCAATCCACTGTATTGAGTATT
TTATGACCTGTGGGAAAACAAAATGGCATCGGACTCAAGGTGAAATCTTGAACACCATAGTTTGAATTCTCAGGCCA
ACAGTCTTCCATGTAAGTCTATATAATCTGCCTCATTCAATTATCGAAGAATTGCTCACATCCAAGGAAAAGAGAGA
GTAAGATTTGAAAATTTATACTCTTGAGTGACACATTTTGAACTTTCAAGGAAATAAATTCATTCTGTCTGATTCAG
TGGGTTCTGAATGAGGACACTTAGCCTGATTCCACTCCAGGATCATAAACAGACTACTTTCCTTAGCAAACTATATT
CAAAGGTTAAGCTCAAAGGATGCAGAGGAAAGTAATCAGATCAACACAACTCTCTCAACCTTTTGGAAATTCTTTTC
GATGATTATTGGGGTAAAGTGTATGATTCCATAACATAATAATATTCAAGATGAAAGTAAAACATTTATTCAATAAT
GTCAGTTTTAAGGAAATTACAATAGGTGAAATATAGGATATTTTTATCTGTTGCCTTCAAAAAAAACCTTTGCACCT
GTCACGGCATAGAGTACATTACTAATTGATTCTCTGTAAGATTATATGAATGACAGTCCATTTTCCTAAGACAGAGA
TAGAATATACTGTACTCTATGGAAAATGAAGAGGGAAGAAACAGATGAACATAGGATGATGTTTTGGATAACTATTA
TTATCCTTTCTACCAAGAGCAATTTTCATTGCTGATGAGGGTAAGAAAATACCTTTGTATTCCACAATAATGCAAGT
GTCCATCTCAGGATGAACGCCATCCATCAAGATCATGAATCGAAGATTTTTGTCTACCTGGAATTCAACAATAAAAC
CAACAACGGTTTACATCTATTTTGCTTTTAATTCAATATTTGAAGAAACTGTCCTCTCTTCTGGAAAGAAATCCCCT
TTTTTCAGAACTGGATTTGTTATCCATCAGAGTCATACCATGGATAATTGGAGAGGAAGACCATCTTATTTCAGCTC
AAATAGAGATTTACACAGGACCATGTACAGAAAAAGTAGGCCATTGTTTCTTTAGTCTTAAAATTTCTATCTCGCCT
CAAATTTATCCCAGAAAGGATAACCCAAACATGTGGAAAGAACACAGACCTGCTGCCATATTCCAAATGGCACTACA
TTGATATTAGTCAACTGGACGCCACTCTGATTCAGATTCCAAAATACAGGTCTTTCCGTGTTGCCAACATAAATGGG
AACATCTGGTCTTCTCTCAGCAAGCTTCTTCAGTGTTGGGTAACTAGGGTCAGAAAGATATACAGGTTGAAAGGTGA
AAAAATAGAATAATCTAGTATAAGAGAGAGTGTGATCCTTACACCAACACGTTGACCGAGAAGCAAGGAACTGAAAA
ACTAGACTCTCCCCAGAGTCCAAAAGAAGAGCTCTTTCCTCAAGGCTGACTATAACAGTGAGGAGGATTTCCTGGGA
GAGTCCTCTTTATTGTTAGAACATCCCATATACCACGGCATGTATATCAAACCAGGTGTGCAAATTCCGTCTTCCAC
ACTGATGCTGCTTTGTGCAAGGGTAGTTCTAACAGAAAGTACAGAGTGGAGAAGTTACGCCAAAGAGGTTTCTGGTT
TCATCTTGATTTTCCTTTTTTTTCTCATTCCTCAGTGCAGCTCCCTCCCAGTGAGAGAAAGGTCTCGGCCATATATC
TAAGAGAACGGATGGGTGCCCACCCTGGGGCAGTTTTTCAAACTTCGAAGGTTGATAGCCACACATGGTATACAGAA
TGAACTCCTTGTCCTTAAAGAGAGTTAGTCACTAACTAAGCAAGACAATAAAGTTTAGCACAGAGGAAAATGACATT
TACCTCTTGTAGCAATCCCAAGTCAGTACACAATGAACCATCCAAGCATTTTTGAGTACTTACATAAGTTGCCAACT
TTCATTTATTAGAATTTATTACATAAAAGGATTATATACTACTGTGTGGGTGGCAAAACATGAACAATAAACAAATA
AATGGCTCTGTAGGTATATTTCAATCATAGTGTTACACACTTTCACATGTTATTGTATTTGATTCTCAACAAAAGAC
CCTTTCATCTTTTAGTGTGCTTTTAATAAATGAGGAAACACACTCAGAAATATATGACTAACAAATAGTAAATTGGT
ATTCAAATTCAGGCTTTCTGATCCTAAACTTGGTGCTTCTTCTATTGAAAGGAAATTCTGGAGTTCCTGTTCTGGCT
CAGTGGGTTAAGGACCCGACGTTGTCTCTATAAGGATGCAAGTTCCATCCCTGGCTTCACTCAGTGGATCTGGCGTT
GCCCTGAGCTGCAGCATAGGTTGCAGATGCAGCTCGGATCTGCTGTTACTACGGCTGTAATGTAGGGTGGCAGCTGC
AGCTTAGATTCAACCCCTAGCCTGGGAACTTTCATATGTTGCAGGTGCAACTGTAAAAAAAAAAAAAAAAAAAAAAA
AAAAGGCAATTCCAACTCTAATGAATGTGCTATCAGGTTTAAGAATCATATTTGTACATAGACTATAATGTCTGGTG
ATATAGGATATTTACTCATAAGAAAAATATAAACAAAATCAGCATATCAGCACTTATTAACCATACTAATATTCAAG
TTCCAAAACTATATTTAATATGTAGAATCCAGAGGGGGAAAATCATTAGGTTTTCTTCTCTAAAAACAAGGGATTCA
AAAAAAAATCAAGGATTCTTTGAACATGTCTTTAATCTCTGGGTTAACATCTAAATCTTCCACTTTAAAGGGCTTTG
GGAGTTAGGATAAATGATTCTAACATGGATGTATTTTAATTTGTGATTTTTAAATTATTGACAATTCTTGCTGGTGT
CTATTAATAACACTATTATAATACTCATATATTTACATAATAAAATCACATTTCTTTGACTAAAGACAGTTTTCTAA
AGCATGCTGGCCCCCTCCCCCTTTGTTTTTGTGAACCAATAAGGCATTATTCAGTAAATAAAGGTCAGACAAGAGCA
ATGGAGATAAATGACTCTGGTGTTTATTAGTTGAGCAGGTAAGAGTCAAAAAACTCAGGGTCAATTCTGTCAAGGAA
ATAAACTCAAAGGAGTGAAAACTGCAAGGCTTGGTAACTTTTCAGCCATAAGCTATCTGCAATACACTACCCAACTA
AAGCATTGTGATACTACAGTTGAGAAGTGGCTTTTTAATGCCTGGCAACTTTGCCCACACAAGCCCCTGAAATCAAA
ATGAAATTGGTTTTCAGGACAGTGGTTGGGAAATGACCAGACTGAATGCCATAAAAAGTTCTTATCCTCACTAAAAT
GTAGTATACTCCCATAGAATATCTCTTGCTAGGACAATGGCAATAGCATCTTGTGACAGGCACTATAAAGCAATCGC
CTCCTTATCTTGACACTGTTCTCTCTAAGCAAGCTGTACAAATTGACTACCACACAACATAGTTATTACACAATGCA
TGAACTCAGGGCTCTCATAATCCTGAAATTACAAGTTTGGTTCCAGAACCTCCTGTGGGACAAAGATATCATGTAGT
AGACAAGTAGATTTTTAATCGTAGCACAATACTCCAGTGGGTGGTATTCGGTTTTTAAGTGTGTTACAGGTAATTTG
TTACTAAAGCTGTTAATTACTTAAGTTTTTAAACCCTTTCCTTAAAAAGCGAGAGAACACACCTGTGCCTTCGAGAT
CTCATGGACTTTCAATAGAAAAATCCAGGGGCCAGTCAACCAACAAACAATGTATTTTCCCTAACCATGGACATTAC
TATCAAAGTATATCCTTCATGTGAACTTGTCATGTAAAGTCACAGGAAAAAAAAATAAAGTTGAAATTGCTTCATTT
TAGAACACCATGGGCACTGCTGGGTATTGGCAACCTGGCAGTAGCAATACAAATTTCTCAATAAGGATGAACACATA
GGACCCTGTAATGAAGCCAGGGGGTTGGGAATAGGAGCATTCACAAATATTTGTAACAGTCCATTCACAAATATTTG
TGGTTTTTGTCAATGAAAGTTCCTCTTTCTCCCTCCTATTTGATCGCCTGGATTCAGGAAGTTTCCGTTTCTATCCT
TAGTATCATATGGCTCTGGTTTCACTGAAGGATGTGGTGGACTCAGGGTTCAAAAGTTGAGAGCTCAGTGTTGTCGA
AATGCTACAGATCAGGAGTTGGCAAAACACAGCGACCTGCTGCTGAATGCTAGGAAGGGCTTTTACCTTTTTTTAAA
GGGTTGAAAGGGAAATCAAAAGGCAATCATGTTTGGTGACACAGGAAACTGTTTGTGATATTCACACGTCATTGCCT
ATAAAGCTGAAGGCAATCAGGCTCCTTAGGACCGACTATGGCTGCTTTTGTGCTATAATAGTAGAGTTAAGTAGTTG
CAATGCCAACCATATGTCTTGTAAAACTCCAAACAGTTTACACTCTGGTCCTTTGTAGAAAATGTGTGCTGATTCCC
ACCATAAATGTTAAACTAAAAAAGGAAGTCAACTTTGATGATCCTTAAACTCAGAGTTTTACCAACTAGCCTGAGGG
TAGGACGTGAGAGGGTCCAGGGTTATTAACCCCATGCTCCTTTCCACAATAGCTCTTCTCACATCCCAATGGTATAA
AACAGGAAGGCACTTTAAAAAGGAGGCTATGCATGTTGCTATGGCAGTGGCGTAGGCCCGGGGCTACAGCTCTGATT
CGACCCCTAGCCTGGGAACCTCCATATGCCACAGGTTCAGCCCTGAAAAGACAAAAAAAAAAAAAAAAAAAAAGTTT
TTAAAAAAAGAGGCTATGCAAATGCAAGCATTTATCTGAATTAGTTCTCTTTTTATCAGCCCAAGCGAATCTACCTC
AGAATGAGCAGTGATTACAAAAAAAGCTGAAAACCAACAGTGCTTTTATTGCAGCATTTTCTTCGGAGTTGAGGGCT
CACCCTTCCTTACCTCAGGTGGTCTGAGTGCATGTGACTGATGTAAATTAAATCTGCGCGGCTCAGCCTCTCCAGCC
AATCAGATGGAGGCTCGTGTAGTAACCACCATCCTCGCGCAAAAGCAGGACCGATTAACCAAGGATCGAACACCATC
CTCTTGTCTCCCAGCTTGAGGTCCATGCAGGCGTGAGTAAGGTACGTGATCTGTTGGAAGACAGTGAGATTCAGATG
ATCGGATCATTACCAGCCAGAAAAAGGAACTGGGCTGGTTAGCAGACAAGCCACATGGGGGACCTTTGCTCCTAAGC
ATGTTCAATGACACAGGACTCAAGAAAGACACAGCAGGAGCATTTCCGTAGAACACAATTCCCAGCACAGGCATTAC
TTTATTAGAACAGAAATGCTCATGGTGGGTTTTAGGGGTCAAACCAGTTGATTTACCCAACTCAAATCACCTCCAAG
GTATTTAATTATGCTCTGTACCACAGAATATCTTTTGTTACCAGTCTTTTAGAACACAATTTACAAGGAAAGGGAGT
TACAGATGTTATGGCAGACCTCTGGGGATTTAAATGGTAGGGTGGCTGTGAATAGGTATAAGAATGACTGGTTCCAG
TGGGTGGACACAGTCATGCAGCCTGGCTGCACTGGCTTCTAAGGCTTTCTCACCTAAATTACTTGCGGACTCACTCA
GGATGTCAAGGTCCTTTGAGAAGGGTGAAAAACAATGACTTAGAGACAGGCAGAGACTACAGGATTCTAAATCAACG
CCTTACTCCCTTCCCATAGTCTGGCACGTCCACAGGAAAAATGAAAACACCAAGGAGCAGAGATAAGGTCACAGAAA
TCCAAATGTGAAAAGCCAGCAAAGAAGGTAGGGAGAGGTCAAGAAATCAAATGCAGGTGATTGTGCCTCTTCTGGGT
AGGTTCCCATTTGTCTCCTCAAAAAAGTAAGAGCCCATTTTTACAAGCTTCCCGAATACTCCAGAAAAATTAATTTT
TGGTTGTTTACCTCTCCCAAACTACCAAAGTGTTTTCTCTGGAGGAAATTCTCTCTCTCTCTCTTTTTTTTTTTTTT
TTTAGGGCCATACCTGCGGCATATGGAGGTTCCCAGGCTAGGGGTCCAATCTGAGCTGTAGCCGCCAGCCTACGCCA
CAGCCACAGCAATGCCAGATTCTTAACCCACTGAGTGAGGCCAGGGCTCGAACCCCTGTCCCCATGGATACTAGTTG
GGTTCGTTAACCACTGAGCAACAACAGGAACCCCGAAATTTTCTTTTAAAAGTGGAAAAATGCACAGAAAAGTTTGT
AAAGATCTTAGGGCAATGTGCAGAAACATGTAGCTGGCCATTTTATCTGACAGTGATCTGGTAGCAAGGGCAGTTTC
TGAACTTCCTCCCATAGCTGTGCATGACTCTCCTTTGGGACCTCTGCTAAAAGATTTTTTTTTTAATCTAGATATAT
TTCCTTGTAATCCTTGCCAAGTTCCTGAGGTTCCTAAATAATGTGCTCAAGAATTTAGAATAGGGAGTTCCCTGGTG
GTCTAGTGGCTAGGACTTGGTGCTTTCACCACTGCGGCTCAGGTTCAGTGCCTGGTCTGGGAGCTGAGATCCACATC
AAGCCACTGCTCACCATGGAAAAAGAAAAAAAAAAAGACTTCAGAATAACTTTATTATATGTCCTAACTAGCCACTT
CCAAGAATACTCAAGGTAATATAAGATGTAAAAAAAAAAAAAAAAATATATATATATATATATATAAATTGATATGT
TAGCTTTATTTGTGTTTTTAAGAATATTATAATTTAACATTTCCTTACCTGCACTTCCCCAAAAGCCAAATCTTCAG
GAGATCTGGGTTCTGAATCCCACGGGTTAGGAGGATTTAGTTCTAGAAGCAAAACTCCATTTTCTTCATCCTTTTCT
ACAACTAGAAGCAAAGGTGGACAAATCTGGATAATCAACCAAAAAAATGACTTTTAAAAAGCATCGCTAAGACAGAA
ATGCATGGCTCAAGTACATGGAGTAGACAAATCAAAGCAAAATCAAAATAAAAGGCAACGCTCATTTGGGTCAAGCA
ACATCTGCAGAGATGAGGGCTGAAGACCAATACTGTTCATCTCGCTATTCACATTCCACGTAAGGAACTCATGAGAT
CGCAGATGTGTCAGAGACACAGGCACACCACCACCAACTTCATTACAATCAAATGAATGATTGATAGAGATGAGTTC
AAGGTGCTGTGGAAGTGTCTCGGAAGGAAAACCTTGTTTGGTTGTAAGAGTCAAAGCTGATTTCAAATAGGAGGTAA
TCCTCCAGCTGAACTTGAAAGACAAAGTATTTGGGGGCTGACAAAAGAGATGTGATGATGGGATATCTCTTTTGGAT
AAAAGATAAAAGGACAACATAAAAGATAAAAGAACAGCATGTGCAAAGGCATGGAGGCATGGGAGAGCTGGATGTTC
ACAAATGACTGGAATTTTATGACCAAGGAGAATGGTGTCTGAACCAGGTGGGAGAGACAGGTAGGTCAGAGTGGGTC
ATGAAGGACCCTAGATTCCCAACTAAGGAGGCGTCTGGATTTCATCCTGTGGCAATGAGGGGTCAATGAAGAATTTT
AAGCAATTGTGGCAGGCATGCTGGTGGCTTGCGCAAAACCTATTCTCTCCTTCTCCCTTACTATTAGCATCCTAATT
GTGTGATGGTACACCTATTTAAAGATTTCCCAGCCCCCTGGCAGTTATGAGTGGCTATGTAGACCTAGCACTATGTG
CAGTTTACATAGTTCTGGCGGGTGAGACGTAAGCAGACGTCTACTTCAGAAGTCTCACGGGACTTGCAGGAACACAT
TTATTTCCCCGACAAAGAGGGACAACTCAAGAGACCAGCACTGTCTCCCCTTCATCCCTTCATATTTCCCCCTCTTG
TGTGGAATTTGACTGCCATGCTTGGAGGAGCACAAGCCATCTTGAGATGCTGAAGAATAGAGCCAGACACTGAGGAT
AGAACAGGAGGTGATAGGGAATTTGGCTCCTTGATAAACACAGAACAACCATAATGCCCAGGATTACCTGCTTGGGA
TCTAAGAAAAACAACCTCCTATATGATTGAGCAACTTTTGCCTGGTTTTTCTATTGCACTGGCTGAAAGCAATACCT
AAGTGCTATAGCAAGGGAGAATTAAAATCAGAACTTAATTTTAGAAAGACCCGCTGTGAGGCACATGGAGAGGATCA
ATTGGAGGGAGGCAAGACCATGTTTGAGAGTCCTCTCTGTTGTTCTGGAAGGCTATCAGCAAACCACTAATGGACAT
GTGCTTGGGAGACAGATGGCCTGTTTCTAGCCCTCACTCTCCCACTTAATAGCTTATTAGCTAGAGGACCTTGAGCA
ACTTATTTGACTTCTCCAGTGTTTTTATCTCTAACCCTGGCTATCTCCACACACAGTTAATCCTATTACTGCCAGCA
ATTTTATTCATTACTAAATGAAAGCAGATGAGGTCCCAAGCCAAAGCAAACCTTGTGGAAATGGCATTGCCGCCCTG
CCCTCAAAGACGAGCACTTTCCTACTTTATTCAAAGGACATTAAAAAATGTTTTGTGGGAGTTCCCACTGTAGTGCA
GTGGGTTAAGAATCCAACTGCAATGGCTCGGGTAGCTGTGGAAATGCAGGTTTGATCCCTAGCCGGGCACAGTGGGT
TAAAGGATCCAGCATTGCCACAGCTGCAGTGTAGGGCACAGCTGCAACTTGGAGCCTGGATTCAACCCCTGGCCCAG
AAACTTTCATATGCTGTGGGCATGGCCCTTTAAAAAATGTTTTGCTTACATTTTCCAAATGAATATTAATTATACTC
ACTTTAAGACAACTGCTAGTGGAAGAAACTGAAGTAAAAATTACCCGTAAAATGAAAAATGGCACAAATGAAACTTT
CCCCAGAAAAGAAAATCATGGACATGGAGAACAGACTTGTGGTTGCCAAGAGGGAGGAGGAGGGAGTGGGATGGACT
GGGAGTTTGGGGTTAATAGAGCAAACTATTGCATTTAGGGAGTTCCCATCGTGGCTCAGTGGTTAATGAATCCGACT
AGGAACCATGAGGTTGCCGGTTTGATCTCTGGCCTCACTCAGTGGGTTAAGGATCCGGTGTTGCCGTGAGCTTTGGT
GTAGGTTGCAGATGAGGCTTGGATCCCGAGTTGCTGTGGCTGTGGTGTAGGCTGGCAGCTGCAGCTTCAATTTGACC
CCTAGCCTGGGAACCTACCTATGCCAAGGGTGAGGCCCCAGAAAAGACAAAAAAAAAAAAAAAAAAGACAAAAAAAC
CCCAAAACACATATACAATAGATGCAAACTATTGCATTTGGAATGGAAAAGCAATGAGACCCTGCTGAATAGCAGAG
GGACTATATCTAGTCACTTGTGATGGATGCATATTATCTGCATCCTGGGCTGCAATTTCCTGATCTGTCAAATAGGA
TTATGATACATACTTTGCAGAGTTGTTGTAGGGATTAAGTGATATAATAAATCCTAAAGTGTCACTATGCCTAGCAC
AGAGAAGGCACGTAATAAATGATAGTATTATTATGGCAATTATTTCACCCTCAAGGAATAAAGAATTAAAAAGGAGG
TTCAAGACTGAACAAACAGGAGTTACTATCATGGCTCAGTGGTTAACGAAACTGACTGGAAACTCAGGTTCGATCCC
TGGCCCCGCTCAGTGGGTTAAGGATCCGGCATTGCCACGAACTGTCATATAAGTTGGACCCCGCTTTGCTGCAGTTG
TTGTGTAGGCTGGCAGCTGTAGCTCCAATTTGACCTCTAGCCTGGGAACCTCCATATGCTGTGGGTGCAGCCTTAAA
AAGACAAGAGACAAAAAAAAAAAAAAAAAAAAAAAAACCCACAAAGATTCAAGAAACAAAATTATATGCTAGCACAT
AACCAGTTCAAAAATACAAGGAATTGGGAATTCCCATTGTGGCTCAGCAGAAACGAATCTGACTAGTGTCCATGAGG
TCCATGAGGAGACAGATTCGATCTCTGGCATTGCTCAGTGGGTTAACAATCTGGCATTACCAAGAGCTGTGGTTAAG
TCACAGATGCAGCTTGGATCCCATGTTGCTGTGGCTGTGGAGTAGGCTGGCAGCTGTAGCTCCAGTTGGACCCCTAG
CCTGGAACTTCCATATGCCACAGGTGCAGCCCTAAAAGCAAAACAAAACAAAACAAACAAACAAAAACCCAAAAAAA
CCGACCAACAAACAACAACAAAAATCCCAAGGAATTACAGGAGACTTTCAGAAAACTACATCGATATCCATGCTTAA
GGATTTTCCTTCTTTAGAAGTGTTCTTTTTCAAGAAAAGCAGGAAAAACTGAGTCTGCAGTTCTTAACTATTATTTC
AAAGCCAATACCATAAAAGTTTTTATGCCCCTTGCTCAAAGATAAATTGCATTTATGCACTGAAGAAAATCATGACA
TCTGCCAACTGCCTGCATCTTTATAGAATGTGGTATCCTTACTTTGACCACATAAACTAATGACATCTAAGTTATTT
GGATTATGACTTAATATTTAACCAGAAGAACAAACAAATGGAATTCATTAAAATTTTTAATAGGGAGGAATAATGAA
GAGGAATTATAATAAAAACATATTAGAAAACTATAATAATTAAATCATAGATAATTGGCATAAGGACGAAGAGAGGA
TCCTAATTAAATAACAGTTTAATATAGTCTAAGAGAAGGACCATAAATTAGTGGAAGAGGAAGGGCTGCCTGATACA
CAGTGCTGTGCAATGGTTAGTTAAGTATTCCAGGTGCTTAAAGACACAAAGAAAAGCAACCAAGTGCTTAAAAAGTA
TGAAAAAAATGGCATATCACAGGGGGGACTTCTAAGTTTAATAGCAATGGAAATAATTCCAATGGAAAATCTTAGTA
GATAGAAAAGTAAAATGAAAAATTTCTACCACCTAAGAAAATGGGCAAACACACTTGGAATATATAAGCATCGTATT
TGAAAAACAAGTATAATTTAAAACAATGATGCTATTTTTGGTTCAAATGAGGAACGTTTGAAAAACTAGAATGCCCT
GAGCTGATAAGGAATGAGGAGAAAAGGCAGGCTGATTAAGTAGTTAATGGGAACAAAAATTGGTTGGGTTCTAAAAA
AATGGATTATAATGCAATACACATTAAAGAATGGGTAAATGAATAGTGGACTCATTCATTCATTTAGGACCTCAAGT
TAAGAGGATTATGTTAACCATATTTCTCAGTTCATGACACATTATATTCAGTCCAGGCAGAGCTACTTACTTACTCC
CTTTATCTTTGTTTTCTACTCTTCTTTACTCTCCTCCCCTGTAGGCAACCATTTGAAAGTTCATGCAAAATATTTAC
TACATTGTATGTGTGCATCTTTAATTTTTATAAATGGTATTGGGTTTCCAGGCTGTTTCTTACTCTTTTTCATTCAA
ATCTATGTTTCTAAGATACATTCATGTTGCCATGTGGACATCTCATCTCTAACTGGAGTTTCACATACCCTGGTGCC
ACATTTTATTGATTCATGCTCCCAGGGGTGGACCCATAGATTCTGCCACAACAGGATTTCTTTGGTACATAAACAGG
CGTGGGATTGATGGGCCACAGTGTATTCATAAACCTGCTCTGCCTAACCACTGTCAGATTACTTTCCCACATGACTG
CACCGGCCATACTCCCACCACAGGCATGACGATTTTTATATCCTTTATCCCTGACATTTGATATCACCTTTGTTTCT
AACTTTTTATCAGTCAAAAAGATGTAAAGTAAAGCACCTCATTGCTTCAGTCTGTAGTTTTCTAATAATTAATAGGT
TTGAGCATATTTTCATGTGCTTATTGACTTTTGGAGATTTTTCTTTTGTAAAATGCTAGTTCATATCCTTTCTTAAT
TTTTGTATTTTCTTAATTTTTATATTGGGTTTCCTATCTTTTTCTTGTCGATTTGCATTACTTCCTCCTATAAGCTG
GATAATATTCCCTCATTGGTTGTAAATATTGCAAAATAATCACTCAAACTATCATATGTTCTTTAACTTTGTCCATG
GGGTCTTCCAGTTCATAGAAATCTGTAGTGTATCGATGATATCTTATTCACTAGGTTTGTGTATATGTGTGTTTCTT
TTTTCTTTCTTTTTTCCCTTTGGGCTGTACTTTTGAAGTATTGTTTGAAAAGTCAAGAAGTATCAGTAATCTCTAGG
TCACAAAAATAGTCTACATTTCTTCCATTACTTTCATAGTCTTACCTTCCTCATTTGAGCTATCAGTCCATGTGAAG
CCCATCTTTATGTTAAAGTATGAGGTGTTAAAAAAAATGGGCGGGAGTTCCCGTCGTGGCACAGTGGTTAACAAATC
CGACTAGGAACCATGAGGTTGCGGGTTCGATCCCTGGCCTTGCTCAGTGGGTTAACGATCCGGCGTTGCCCTGAGCT
GTGGTGTAGGTTGCAGACACGGCTCGGATCCAGCGTTGCTGTGGCTCTGGCGTAGGCCGGTGGCTACAGCTCCAATT
CGACCCCTAGCCTGGGAACCTCCATATGCTGTGAGAGCGGCCCAAGAAAATGGCAAAAAGCCAAAAAAAAAAAAAAA
AAAAAAAATGGGCGAAAGCATGAGTTAGTCATATCCTTTTGCCAGTAATTCATTTGTCTCACAGAAACAACTCCAAA
CACAAAGCAGCTCTTACGCACAATGATCACAGTTTCGTTTTGATGGAAAAAAAAAATTATGAACAGTCTAAATTTCA
ACAACAGAAAAATGGCTAAATAAATCATGTAAGTTAATATTTAATGTAAACATACTTTATAATTGTGTATATATGGA
ATCTGACCTAACATGACTACTATAATAATTTTAACAAGACAAAAAACAGGATAAAAAAAGTAATATATAAAATAATT
ACAATTGACTGGAACAACTAGATAGAAGATGAACAAGGAAATAGAAGACTCGAACAGCACTATAAACTAACTAGACC
TAACAGACAAAAAAAGCACATTCCACCAGCAGCAGAATACACATTCTTCTCAAGTACATTTGGAATATTCTCCAGCA
TAAACTATGTTATATAAACGTTTCAATAAATTTTAAAAGATCAGTCATACAAAGTATGTTCTCTGACCACAATGAAA
TGAAATTAGATACTAATAAGAGAAGAAAGTTGGAAAATTCACAAATATGTGGAAATTAAACAACATACTTCTAAATA
CAAACAGTTTAGGAAAGAAATCACAACAGAAATTACAAAATGCTTTGATACAAATACAAATAAAAACATAACATGCT
GAAACATAGAATGCAGCTAAAACAATGCAGTGCATAGAAGGAAATTTATATCTGTACACACCTATAATAAAAAGAAA
GATCTCAAATAAAAAAACTAAACTTCCACCTTAAGAAATTAGAAAAAGAAGATCAAACTAAACACAAAGCAAACAGA
AGGAAGGAAATAAGAAAAAAAATTAGAGCTAAATGGAATTTAGACCGGGAAAACAAGAGAAAATCAATGAAGATAAA
TGTTTGTTTTTTGAGGGAGTTCTCGTCATGGTGCTTCAGAAATGAATCCGACTAGGAACCTGAGGTTGCAGGTGTGA
TCCCTGGCCGAGCTGTGGTGTAGGTCACAGATGCAGCTTGGATCTGGCATTGCTATGGTTGTGGTATAGGCCAGCAG
CTGTAGCTCCGATTAGACCTCTAGCCTGAGAACTTCCATATGCCTCAGGTGCAGCCTTAAAAAGCAAAAAAAAAAAC
CAAAAAACAAACAAAACAAAAAAGTTAGTTATTTGAAAAGATTAATACAATTACAAACCTTTAGCTAAACTGACCAA
GAAAAAAGAGAAAAGACCCAAATTACTACAGCCAGGAATTAAAAGGGGGATATTACTATCAATCTAAATAATCCAAA
TGAAATGGAGAAAGTCCTAGGAAGAAACAAATGAACAAAACTGACTCAAGAAGAACTAGAACGTCTGAGGAGCAGAC
CCATAACAAATTAAAGAGATTTAATTAGTAATCAAAAAACTTTTCACAAAGATTAGCCATGGCCCAGATGGCTTCAC
TGGTGAATCTGACCAAATGTTTAAAGAAGAATCAATACCAATATACTTCACAAACTCTTCCAATAAATAGAAAAGGA
GGGAACACTTCTCAATTCATTCTATGAGAGCAGTAATTATTACTCTGATCCCCAAACCAGACAAAGATATCACACAA
AGAGAAAACTACAGACCAATATTCCTTATGAATATGGACATAGAAATCCTTAATTGAATATTAGCAAATATAATTTA
GCACTATAAAAAAGAATTATGACCATGAGCAAGTGGGGTTTATGCTAGCTTGATTCAATATAGGAACATCCATGGAG
ACAGTAAGTAGATTAGTGGTTGCCAGGGGCTGAGGGAAGAAGGGAATGGACTGCTAATAGTTAGAAGGTTTCTTTGG
GGGATGATGTGAATGACCTGGAATTATATAGTGATAGTAATAGCACAACATGTGAAAATACTAAAAACCATTGAGTC
AAACACTCTAAAAGGGTAAATTTTATGGTACCTGAATTGTATTCCAATAAAAGGAGAAGGAGGAAGAAGAGGAGGCA
GGGGAGAGGCGGGGAAGGGGACCAAGGTGACAACTGGCAGATACCAAAACACTGATGGAAATGTAGGTGAGAGTCTT
CTTCCTTCTACTTTCCTAACATCTACCTTTTTTAATGATGACCATACAATGTTATTTATTTAACAATAAAACCAAAT
AATCTCAGCTCACATGGGATTGAGCCATCCTTTTCTTTCTTGGGATGTGGTATGAAATCACTACAGTATTGGTAGCA
CTGTACTGAAAAGTGGGTTCTGTTAACAAAATTTTCTACTCTCACAACATTACCTTACTGGAGCAGAGGCTGAAAAC
TGCAGTGGGTCTTGTTATTTCCAGTCCTCCACTGACCCTACTGACAACTCTGGCCCTGCCCTTCACCTGCCGTGGCA
GTGAACATCAACGCTTTGCATCATTTCCTGGCCTCAGTCTATTTTCCAGTTTACCCAACTTTCTGCTGGGTGGGAAA
TCCCTCCTTCCTGCTCCACAGGACCCAGTCACAAGGCATATGGCAGACTATTTGAGTCATACATATACAAGCAAATC
ATTACTCTGTACTCTGTCGTAACACGTTCTGAACATTTAACAGATGTTCTTTCAACAACCCAGTAAAATCACTACTA
CCAATATTATCTCCCATTGAGGAAACTAAAGAACAGAGACTAACCCACCTAAAGTCATTTAATTGCATGTTTGAGCA
TCAGGATATGAACCCACGCTAGTGAGCCCCATTCACTCTTAACCATTTTGCTAAAAGGTCTCACTATAGGTCTTATC
CAAAAGACTTAGCTCCCTTAAGGAGCTATAAGTTTCTGGGTTACATACTCATAAAGTAGATGGTCAATTGTCCTCTC
ACCTACACAAACAGTTTAAGACAGTCAAACTTTTGCTTCTTATCTCTTTTTTTTTTTAATCAGATGAATTAAATAGT
ATTTGTACAGCACATGTAACCAGTTCCTGCTAACAATGTGATCTGAAGATTTCCTAGGCTAGGTCAACAGACAAAGG
GTGGGGGCTTTCTGGCAAAAGAAGGAAATGGTTCAGGCATCCCTTTGAGGGGCAAGGTGAGAATTAGTCAATATTTC
CAAAAGTCATTTAATTGTGTTAGATCAAATCTACTTTTTTATTTATATAACAGTCATTCTAAAACAGTGTGTAAAAG
CAGTTTTAAGAATCTTCCCAAGTAACTTTTTATACTGATAAAGACATTTTTAATCACTTAGAACAGAGACAAATTTA
TTCCTATGATTAAGCCCTTCTTACTCATATTTCTATAGGCTTTCTTGAGTAGGAAGAAGGAAAAAGTAGAAGTGGAG
CCAGCATGAGAATCACACAGAAGCTGTAGCCTCTAACGTGTGCCAGAAAGAGTCATGGAATTTGAAGGACTTTATTT
CCCAACTGGAATTGTGAGTTTCATTATAACGTCTCATTATATCATCTCATTTACGCCGACTCTATCTTATCCATCTT
TGTATTTCTTAATACCTAGTGCAATGTTTACACATGGTAAGGTCTCATCAAATACTTACTGAACAAATGAATGAATG
AAGGGATTTTTTAGAGAAAACTTGCCTAGAATTTTCAGTGATGGTTACTTTTAAAATACCTCAGTTTAAAATCAGAA
TGCATCCAAGGCTTCTAATGAGATTGGAAACAAGTTGACAAGAGGGACCCCAATGACAGTAACAGCAGAAAACATTG
ATCAGTATTGATGGTATTTACCCAGTTCGTCTTGACAGAAGCTTCCAGGAGGATTGATATACTTCATGCTGCTTACA
TCTAACTTCCAGTTGTGTTTTGTGCATTTAACAGACCTGGATGGAAAATTGTACTTAGGTTTATGAAATGGTGAAAA
TAAATATTAATCTATTTAAGGCTTAAATGCATTATTCTGTGATCAAAGTAAACGACTGTAGTTGGTTGAACACAAAA
CTCATGAAAGGAAAAAAATAGCTAATATTCAAATATCCAAGGAAATATAAACTCATCATCAGTAGGTGATTTTGAAA
GTGAAGATATTTTTTCCTTGTATTTGATTTTTGTCAGTTTGATTTGTATGTGACTTTGCACATTTCTCCTTGGGTTT
ATCCTGTATGAGACTCTTCGTGTTTCCCTGACTTGAGTAAAGTGAAGATAAACACCATGGCACAAAATAACGTGTTA
GAGATCAGCAGAGCCATCAGAATAAAGTCTGCTTTGGAGTTCCAACTGTGGCTCAGCAGGTTAGGAACCTGAGCAGT
ATCCATGAGGATGTGTGTTCAATCCCTGGCATTGTTCAATGGGTTAAGGATCCAGCATTGCTGCAAGCTGCAGTGTA
GGTCACAGATGCAGCTCAGATCTGGCATTGCTGTGGCTGTGGCATAGGCTGGCAGCTGCAGCTCTAATTTGACCGCT
AGCCTAGGAACTTCTATATGCTATGGGTGCAGCCCTTAAAATTTGTTTTTTTTTTTAAAGAATAAAGTCATCTTTAA
GGATGACTCTCATACAAAAGCTAAGCTGAGTAAGATCCAAGTGGGGCCAGTATAAGGAAATAATGTAGTAATAAAGA
TTATCTGTGATTTAATAGTCACACTATAACCCTTGGCCCCTAGTATAGTGTACTAAACCTAAGATCAACTCAAATTT
TCATTTGTCTAAGAAAAAAGACTTCCTGATTGTTTAAAGATTTCTGATCATGGTTGCCAGATAAAATACAGGAAAAA
TATAAATTTCAGATAAATAAAAAATAATTTTAAAATGTCTTACACAATATTGAACATATATTGGAAATTTGTTTATC
TGTAATTCAAATTTAACTACTCAGCTTTGCATTTTTATTTGTTAACTCTGGCAACACTGCTTCAGAATGAGAATCAG
ATTAATTGTAGCAACAAAGGAGGCTTAGTAATATTTTTTCCATTTCTTACCAGACGGTGATAGGGATGTGATAGTTG
GAGATAGGGCCTAAAAGTTCCATTTCCTCTCCATATTTGGTAGTCTGTCTGGCTGTCTTTCTTTCTTTCTTTTTGCT
TTTTAGGGCTGCACCTTTCTTTTTGCTTTTTAGGGTGGCATATGGGGGTTCCCAGGAGAGGGGTTGAATCGGAGCTG
CAGCAACACCATATCCTTAACCCACTTAGCGAGGCCAGGCATCAAACCTGTGTCCTCATGGATACTAGTTAGATTCA
TTTCTGCTGTGTCCCAGTAGGAACTCCCATATTTTGGTAGTGTTTCCAGTCAAGTTTTTTTTTAAACAGTTCAAGAT
TTTTTTTTTTTTTAACAGACAAATATGTCTTCAACCAGAAATATCAGATTGTTTAAGCTAACAATGTCTATTTTCAC
TTATATATCAGTAAACTATGCTGATTTTTTCCAAGCTTCATTACAATCAAGAATTTTTAATGCTCTTTTCTAGTAAC
AAGGCAGAAAACATATTCAAACTTCGACTTATGGAGGATATTTTGTGACACTTCCTTTCTCATCAATGAGTAACTAA
CAACTATCATGGCTCAGAGGTTAACGAATCTGACTCGTATCTATGAGGACGAGAGTTTGATCCCTGGCCTCGATCAG
TGGGTTAAGAATCCAGTGTTGCCGTGAGCTCTGGTGTAGGTCAAAGATTGGCTCGAATTGTGCATTGCTGTGGCTGT
GGTGTAGGCCAGCAGCTACAGCTCACATTGGATCCCTAGCCTGGGAACCTCCATATGCCATGGGTGCGGCCCTAAAA
AAAAAAAAAAAAAAAAAAAAAAAAAAAAAAAAAAAGATGAAATAAATAAATTAACAAAAATTGAAAACATTCCAAAT
GCAGCTATTCAGCAGGCTGGGTCGTTAAAGGAGAAATGTGGCAGTGTCACAACTGCTCATGGGCAGTAGGCAGAAAG
GAGAGAGAGGACAGCTTCATGTGCCAAGAGGCTGTGAAATTAGATTGACAAAATGAGGACCACAGCTTATGAGAGTT
CCTGATCTTGATTATGTACAAAGAAGAAAAATGGCTGAGGAAGGGAAGGTGGAACAGGTAGGTCACTGCCCTTGACT
GTATCGTGGAAGAGATATTTCAGGTGAATTGCTGCACAGAGAGCCTAAGTAGAAGCAGCCAAATTTGGAGAGATGGA
TGGGGGAGTGTACCATGTAAACTGCTCTTGGGATGGAGTTTCAGCATATAAATGCTTGGGGAGCTGTATCTGGGAGC
AAAGCTGGGTGAATCTGGCTCCCCACCTGCAGCAGAGCTAAGATGGTGCCATCTCCATGTTAGCCTGCCAACAGAAT
AGGTTGAAACTGGGATCGTTCACCCCCTAAGGCTTTGGGTGAAGGAGAGGAAGACCAGTCTGTGGCAAAGCAATTAC
CATATTAAGCTGAGCAAGCCAGATTCAAGAACAGCCTGAATTCCTGTAAAGAACCTCTGTTCCTAAGCTACGCAAGA
TCATGGCAGAGTAATAATAATAGCAAATGTAAGTGACATTTATTGAGCATGTATCATATGCCAGACATTATTTTAAG
TGCTTTAGTGTATGAAATCACTCCATCCTCTCAGTAGCCAGACAGAGAAGGCTTTGTCTACTTTCATTTTCACTTTA
TGAGGAAGAAGAGCGAGGCCCAGAAAGGCTAAGAAATGTGTCCGAGGTCACAGAGCTGCTAAGTGGTGGAGCCAGGC
TTCTAAACCAAGCAGTTTGCAAGGAAAGACCATGCTCTTAATCATAAAGCTGCAACACTCCCTTAAACAACTGGCTA
AGACAACACCACAGGACATGGCCCACTAAGGAGAAAAAAGGACAGAGAAAAAGCAGAGTCCCCGGGCCACAAGTCGG
AAGACCTCAAGGCCTGCACGTGCCTGCAGAAGCTTCTTGGTGACAGAACAACCTATGGCTGAGGTCTCCCTAACTTG
AAACCACCCAGAAGATGCAAGGGACTCAAAAGCAGTCTGTCAGCAAACAACCAAGAGGTTCTTCCAGAGTAGGCTGC
CTACCAAAAGTATGTCCCATGCAGTGCCTGAAACATATCTAACTAAAAATATATTCGTTGTTTATCTGAAATGCAAA
TTTGACTGGGCACCCTCTATTTGCCTAATCTAGCAACCCTATCTGCAGAGCCAAGCAAGCTACAGGTATGACAGCAC
TTAACCTGGGAGCTGGGCCCTGAAGCTAAGTATGCAGTGATGCAAGTCTGTGGGCCAGTGTAAGAAGATTCCAGACT
TGGGTGGTGATCTTCTATACAGTTAGAGCAGGGAGTTCTTGGACAGCTACCAGTTACCTCTGAGTCCATTCGCACTA
AACTGCCCACAGATGACCTGAGAAATAAGATTGACGACACGACACGGTGGAAGACAAGCCTAATATGGAAACGGCTG
AAACACTACGAGAGTCAAGTTAGGCTGAAGCAAAGCTTGAAAGATGGGGTCAATCCCTCATTCATTATCAGTGGTGA
GCATCAGGCTGACAAAACACCTCCACCCAGAACTCCCCCTGGCTCTGCAAGCTGTGCTAGCTCTTTGTCAATCACTG
AAAAGAAAGCCCAACCATCCTATCCTAGAATTGCTCCTGAGATGGGGAGGTAAGCGATATGCAGGTTTAATCAAGGG
GCTGGGGAAAAGGCGTACCAGCACTCGTTCTTCCAAGAAATGATCAGAAGAGCCGCTGTTGAGGCCAGGTGCAGCTA
GAGCTCTGCCATTTTTCGGGTTTTCATCAGGGAAAGTCTCTCTGTTCTAGGGCAGTGTTTGGACAAGCACTCACCTC
ACACACACACACTTCTGAGAGAGCAGGAAAGGAAATCCAAAAGAGGCTTGAGTCTTTGAATATAAAAGCTGGTAAAC
ACACACACACACACACACACACACACACACACACTCCTTAGAAGTTTCACTGTTTATCAACTAGGAATACATTTTAA
ACAATAGTTCTTCAGAGAGGATGGGAAATTAAGTCAAGGTCATAAATCAAAATCAGAGAGCTGCCGTAAAGGAGCTT
AAGAAAAAGTTAGGCATGTGCTGGGGGAAATAGCATGTTGATTGGATCATTTAAAATTTCTCAATGAGCACATTTCC
TGCCAAACCTAATTGGGAGAAAGGATCGCCAGGGAGAAAGCAAAGGATTCTCAGTACCTTCCATTTAGATCCTCAAT
GTCTTTAATGAAGAGGCCTCCTTGGTGCTTGCACATGTTCTTACATGCCTTCAGGCGGCTCTTATTCTTAAATAAGA
TGTAATCCTTGCCAGTGCTCTTATTTCGAACAAAATTGATTCCTTCCTTGAGATTGGCAGCTTCGGCAGGTGAGAGG
CACAACAGGATCTCCGTCGTTTGTTCGATG

| | |
|---|---|
| SEQ ID NO: 15 | CMAH cDNA Sequence |

ATGAGCAGCATCGAACAAACGACGGAGATCCTGTTGTGCCTCTCACCTGCCGAAGCTGCCAATCTCAAGGAAGGAAT
CAATTTTGTTCGAAATAAGAGCACTGGCAAGGACTACATCTTATTTAAGAATAAGAGCCGCCTGAAGGCATGTAAGA
ACATGTGCAAGCACCAAGGAGGCCTCTTCATTAAAGACATTGAGGATCTAAATGGAAGGTCTGTTAAATGCACAAAA
CACAACTGGAAGTTAGATGTAAGCAGCATGAAGTATATCAATCCTCCTGGAAGCTTCTGTCAAGACGAACTGGTTGT
AGAAAAGGATGAAGAAAATGGAGTTTTGCTTCTAGAACTAAATCCTCCTAACCCGTGGGATTCAGAACCCAGATCTC
CTGAAGATTTGGCTTTTGGGGAAGTGCAGATCACGTACCTTACTCACGCCTGCATGGACCTCAAGCTGGGAGACAAG
AGGATGGTGTTCGATCCTTGGTTAATCGGTCCTGCTTTTGCGCGAGGATGGTGGTTACTACACGAGCCTCCATCTGA
TTGGCTGGAGAGGCTGAGCCTTGCAGATTTAATTTACATCAGTCACATGCACTCAGACCACCTGAGTTACCCAACAC
TGAAGAAGCTTGCTGAGAGAAGACCAGATGTTCCCATTTATGTTGGCAACACGGAAAGACCTGTATTTTGGAATCTG
AATCAGAGTGGCGTCCAGTTGACTAATATCAATGTAGTGCCATTTGGAATATGGCAGCAGGTAGACAAAAATCTTCG
ATTCATGATCTTGATGGATGGCGTTCATCCTGAGATGGACACCTGCATTATTGTGGAATACAAAGGTCATAAAATAC
TCCATACAGTGGATTGCACCAGACCCAATGGAGGAAGGCTGCCTATGAAGGTTGCATTAATGATGAGTGATTTTGCT
GGAGGAGCTTCAGGCTTTCCAATGACTTTCAGTGGTGGAAAATTTACTGAGGAATGGAAAGCCCAATTCATTAAAAC
AGAAAGGAAGAAACTCCTGAACTACAAGGCTCGGCTGGTGAAGGACCTACAACCCAGAATTTACTGCCCCTTTGCTG
GGTATTTCGTGGAATCCCACCCAGCAGACAAGTATATTAAGGAAACAAACATCAAAAATGACCCAAATGAACTCAAC
AATCTTATCAAGAAGAATTCTGAGGTGGTAACCTGGACCCCAAGACCTGGAGCCACTCTTGATCTGGGTAGGATGCT
AAAGGACCCAACAGACAGCAAGGGCATCGTAGAGCCTCCAGAAGGGACTAAGATTTACAAGGATTCCTGGGATTTTG
GCCCATATTTGAATATCTTGAATGCTGCTATAGGAGATGAAATATTTCGTCACTCATCCTGGATAAAAGAATACTTC
ACTTGGGCTGGATTTAAGGATTATAACCTGGTGGTCAGGATGATTGAGACAGATGAGGACTTCAGCCCTTTGCCTGG
AGGATATGACTATTTGGTTGACTTTCTGGATTTATCCTTTCCAAAAGAAAGACCAAGTCGGGAACATCCATATGAGG
AAATTCGGAGCCGGGTTGATGTCATCAGACACGTGGTAAAGAATGGTCTGCTCTGGGATGACTTGTACATAGGATTC
CAAACCCGGCTTCAGCGGGATCCTGATATATACCATCATCTGTTTTGGAATCATTTTCAAATAAAACTCCCCCTCAC
ACCACCTGACTGGAAGTCCTTCCTGATGTGCTCTGGGTAG

| | |
|---|---|
| SEQ ID NO: 16 | CMAH Protein Sequence |

MSSIEQTTEILLCLSPAEAANLKEGINFVRNKSTGKDYILFKNKSRLKACKNMCKHQGGLFIKDIEDLNGRSVKCTK
HNWKLDVSSMKYINPPGSFCQDELVVEKDEENGVLLLELNPPNPWDSEPRSPEDLAFGEVQITYLTHACMDLKLGDK
RMVFDPWLIGPAFARGWWLLHEPPSDWLERLSLADLIYISHMHSDHLSYPTLKKLAERRPDVPIYVGNTERPVFWNL
NQSGVQLTNINVVPFGIWQQVDKNLRFMILMDGVHPEMDTCIIVEYKGHKILHTVDCTRPNGGRLPMKVALMMSDFA
GGASGFPMTFSGGKFTEEWKAQFIKTERKKLLNYKARLVKDLQPRIYCPFAGYFVESHPADKYIKETNIKNDPNELN
NLIKKNSEVVTWTPRPGATLDLGRMLKDPTDSKGIVEPPEGTKIYKDSWDFGPYLNILNAAIGDEIFRHSSWIKEYF
TWAGFKDYNLVVRMIETDEDFSPLPGGYDYLVDFLDLSFPKERPSREHPYEEIRSRVDVIRHVVKNGLLWDDLYIGF
QTRLQRDPDIYHHLFWNHFQIKLPLTPPDWKSFLMCSG

| | |
|---|---|
| SEQ ID NO: 17 | CXCL10 Genomic Sequence |

CTTATAGTAACTTTATTACCTTTTTTGTCTGAACAGTTAGTCTTTCTTAATGTTTCTAGGAGAGAACATTAGTTTTA
TTTTGAAGAGCACCCACTCAGCGTATTTGTCTTACATAACATGCAGAACATGTATCCACATTTAAAAATTTATCTCA
TTGTAGTACATACTTTTACAAGGTATTCCATAAACACTGAAAACTATAAGAAACATATACATCTAAGAATCCTACTT
TATATAGTCTTTCACTAAATAATACTATTTTCATATACATTTTCAGGTATTTCTAGCTTCTCCTGTGTATTTAGAAT
TATGTATGTAATCACCAAGAGAATATGGGCCCCTTGGAAGGAAAGCAGTAGAAGCCCACGGAGTAAAGATCTTTCTT
TAAAAAGCAGGTTTTATTATTGTTTTAAATACCTCTTGGTTATTTGAGATTCTAAGAACTTCGATTAAGTCCCAAAG
TGGAATGATCCCTTAATAACCAGACGATAGGAAAGGTGAGGAAAGTGTCAGTAGCAGGGCCAGGACTTGGCACATTC
ACTAAGAATGTAGCACCTCAGTGTAGCTTATAGTATAGTGCCTGGGCAGAGTTACTGCTCAACAGCTCGGGATGATG
AACCATCTGCTGCCCTGCAAGTGTGGGAGCAGCTAACTTGGTGACTGCAATCCATGGACAGTTAGGGCTTGATGTAT
GGTGTATGTAGAGAGATGATGGCAGAGGTAGATTCTCTCCGGCCCATCCTTATCAGTAGTGCCGTGATTATGCTTCT
CTCTGTGTTCGAGGAGATCTTTTAGACCTGTAAGAAGAGAGGGAGAGTGTGAAAGACTCTGGTTTCAGTCTGAGTTC
TGCTTGGAACACACTGAATTCATAGATAATCCCAAGTTCTCAGGTGAAGTGTGGTGAGATTTCCTGCTACACAATCA
TTGTGTGTTACAGGGGATCCTTTTTAAAAAAGGCCAGGAAAGGCTTGTGGGAAATTTGGTATCTTTGCTTGGATAGT
TATAACTCTGCCTCAAGGTTGAAATGACCTATTGACACTTCTAGATAGGGAATCAGGTGACTTGATATACCACATAA
GATGACATCTCAGTATATAAGCACATGAAGGTAATGGCACAGTGGTGGTAACACTCTTTTAAGCCAAAGATTCCCAG
GAAGGCCCAATGCAAATATTTCTAACTTCCCAAAATTGACATTTCTTAAAGAGAAATACTTCTGCAAGCAGTAGCAA
ACCTACCTTTCTTTGCTAATTGCTTTCAGTAAATTCTTGATGGTCTTAGACTCTGGATTCAGACATCTTTTCTCCCC
ATTCTTTTTCATTGTGGCA

| | |
|---|---|
| SEQ ID NO: 18 | CXCL10 cDNA Sequence |

ACGCGGGGGAGACACTCTTCAACTGCTCATTCTGAGCCTACTGCAGAAGAATCTTCAGCTGCAGCACCATGAACCAA
AGTGCTGTTCTTATTTTCTGCCTTATTCTTCTGACTCTGAGTGGAACTCAAGGAATACCTCTCTCCAGAACTGTTCG
CTGTACCTGCATCAAGATCAGTGACAGACCTGTTAATCCGAGGTCCTTAGAAAAACTTGAAATGATTCCTGCAAGTC
AATCTTGCCCACATGTTGAGATCATTGCCACAATGAAAAAGAATGGGGAGAAAAGATGTCTGAATCCAGAGTCTAAG
ACCATCAAGAATTTACTGAAAGCAATTAGCAAAGAAAGGTCTAAAAGATCTCCTCGAACACAGAGAGAAGCATAATC
ACGGCACTACTGATAAGGATGGGCCGGAGAGAATCTACCTCTGCCATCATCTCTCTACATACACCATACATCAAGCC
CTAACTGTCCATGGATTGCAGTCACCAAGTTAGCTGCTCCCACACTTGCAGGGCAGCAGATGGTTCATCATCCCGAG
CTGTTGAGCAGTAACTCTGCCCAGGCACTATACTATAAGCTACACTGAGGTGCTACATTCTTAGTGAATGTGCCAAG
TCCTGGCCCTGCTACTGACACTTTCCTCACCTTTCCTATCGTCTGGTTATTAAGGGATCATTCCACTTTGGGACTTA
ATCGAAGTTCTTAGAATCTCAAATAACCAAGAGGTATTTAAAACAATAATAAAACCTGCTTTTTAAAGAAAGATCTT
TACTCCGTGGGCTTCTACTGCTTTCCTTCCAAGGGGCCCATATTCTCTTGGTGATTACATACATAATTCTAAATACA
CAGGAGAAGCTAGAAATCCCTGAAAATGTATATGAAAATAGTATTATTTAGTGAAAGACTATATAAAGTAGGATTCT
TAGATGTATATGTTTCTTATAGTTTTCAGTGTTTATGGAATACCTTGTAAAAGTATGTACTACAATGAGATAAATTT
TTAAATGTGGATACATGTTCTGCATGTTATGTAAGACAAATACGCTGAGTGGGTGCTCTTCAAAATAAAACTAATGT
TCTCTCCTAGAAACATTAAGAAAGACTAACTGTTCAGACAAAAAAGGTAATAAAGTTACTATAAGCCAAAAAAAAAA
AAAAAAAAAAAAAAAAAA

| | |
|---|---|
| SEQ ID NO: 19 | CXCL10 Protein Sequence |

MNQSAVLIFCLILLTLSGTQGIPLSRTVRCTCIKISDRPVNPRSLEKLEMIPASQSCPHVEIIATMKKNGEKRCLNP
ESKTIKNLLKAISKERSKRSPRTQREA

| | |
|---|---|
| SEQ ID NO: 20 | CIITA Genomic Sequence |

GCAGTGGACAGTGCGCCACCATGGAGTTGGGGCCTCTGGAGGGTGGGTACTTGGAGCTTCTCAACAGCAGTGCCGAC
CCTCTGCAGCTCTACCACCTCTATGACCGGATGGACCTGGCTGGAGAAGAAGAGATCGAGCTCTGCTCAGGTGGGCC
CTCCTCCCTCTGGCCCTTTTCAAGTCCTTCCCCAGCCCTCTGCCTGCCATGGAGCGCTGCTCAGCACCACGGACAGC
TCCAGAGCCCGCCCCCCGGGGGCGGGCTCCTCGTGGGGACATCTCCCAGCCTGCCCGGCTACCCCCTCCTTCCCCAC
CAGCCCTCTTTCCTGGCTCTTTCCTGCTTCATCCAAGTGGCTTTTCCTCCCAGAACCTGACACGGACACCATCAACT
GCGAACAGTTCAGCAGGCTGTTGTGCGACATGGAAGCAGATGAAGAAACCAGGGAAACTTACGCCAGTATCGGTGAG
GAAGCATTCTGAGCCAGAAAAAGGACAAGCGAGGGGAAGAGGCTTCTTTTCTCTTTGGTTAATCTCACCCACTCACC
AGGAGCCAGCAGGCCCTACCTCAGAAATCTGGGCCAGGGGGATGGGGAGTGAGGGCTGGAAGGACGGAGAATCAGGG
AAGAAGAGAGATGGAGAAGGGGAGGGAAATAGACCCCTTCACCAATGAACACCAGGCAATTAAGTCGCACTTTTACA
GAGCTCCCATTGTGGCTCAGTGGTAACAACCCTGACGAGTAACCACGAGGGTGTGGGTTCGATCCCTGGCATCGCTC
AGTGGGGTTAAGGATCTGCTATTGCCCTGAACTGTGGTGTAGGTCGCAGGTGTGGCCTGGATCCTACATTGCCGTGG
CTGTGGTATAGACCAGCAGCTGTAGCTCTGATTTGACCCCTGGCCCAGGGACTTCCACACATTTTACATGGGGCCCT
TTAAAAAAGACAAATCTCACTTTTACATCCTCTGCCTCTATTTCTACATCTTTTTCTATTAGTTGCTCTTCTTTCCT
TCCTTCCCACAAAGCCTATGTCATACACCGCTCCCTCTCTCCCAAGCTCCCAAGCTAAACTACTCTAGTATTTGTAG
TAACTACCATTTGGGGAGCATTTGCAGCCTGCTAATCGCTGTGCGTGTCTTATCACATTGAATCCTTACAAAGACAA
AGGAAGTAGATATTCTTAGTATTTTCACTTTACAGATGAGGCAACTGAGGTTTAGCGAGATAAAGCAATTCACCCAT
GTCTGCGTTAGAGACAGTAATGGGCATGTCTGAAATTCTAACTGAGGTCTTATTTTTAACCACAAAAACCAAAGTAC
CTAGGGTGGGGAGGTTTGCTAAGGCTTAATCTAAGAGGCTGGTTTGCAGCTTTATTGTTTTTTTTTTTCTTTTTAGG
GCCACACCTGCAGCATATGGACGTTCCCAGGCTAGGGGTCAAATCAGAGCTGCAGCAGCCAGCCTGCACCACAGCTC
ATGGCAACACCAGATCCTTAACCCACAGGGCGAGCCCAGGGATCGAAGTCGCATCCTCATGGATACTAGTCGGGTTT
ACTGCTGCCGAGCCACAGTGGGAATTCCTTGTTTGTAGCTTTAAAAAGAGCGACACGGATCCCACGTTGCTGTGGCT
GTGGCATAGGCTGGCAGCTGCAGCTCTGATTTGACCGCTAGCCTAGGAACCCCCATATGATACAGGTATGGCCCTAA
AAAGACAAAAAAAAATTAAGAGCTGCATTATAAACTACAACAGAAAAAAATGTTAAAGACTACATATGTACAACTGA
ATCATTCTGCTCTACACTTGAAACTAAAACAATATTGTAAATCAACTATACTTCAATTTTTAAAAAGAGCCTCAGCT
TTCAGTCAAGGGTAGAACTCTTTGGGGAGAAAAGTTTCTGTTCTGTTGTGTTTTTTGCGGGGTAGGATGGGGTAAAG
GCTCTCTCCTTACCAGGGACATCGCTCTCTTATACAGAGGCTTTGTTCAAATATAAAAAGATGCTCCTTCTTCTGGA
GGATGGAGCCCCCATTAAGAAGTAACAGCTTGGGAGTTCCCGTCGTGGCGCAGTGGTTAACAAATCCGACTAGGAAC
CATGAGGTTGCGGGTTCCGTCCCTGCCCTTGCTCAGTGGGTTAACGATCCGGCGTTGCCGTGAGCTGTGGTGTAGGT
TGCAGATGCGGCTCGGATCCCATGTTGCTGTGGCTCTGGCATAGGCCAGAGGCTACAGCTCCGATTTGACCCCTAGC
CTGGGTACCTCCATATGCCACGGGAGCGGCCCAAGAAATAGCAAAAAGACAAAAAGNCCAAAAAAAAAAAAAAAAAA
AAAAAAGTAACAGCTTGGCTATCAAAGTGCAGTCTGGATTTCTGCCCCTTTTGCCCTCTTGGCTAGGCCCCCTTGTA
CAGTGAACAACCTTCACAACTGTTTTTAGTGGCCCTTTTCCTGGCAACCCAGGAACGACATCCCTTAGGAGGTCTGG
CATAAATGTGGCCAGTCTTTCCACAGCACAGAGGGCAGAAAATGGAGAGGAACAGTAACCGTACGTGTCTCAAAAAT
TGCAGAACTGAGAGCCTGCCTGTTTCCTTTCCTTTCTGGGAATTTACTTGCTGGAAGGAGAAATATTTGGGCCTGAG
GGTATTCACAGTTCCTCACAACTGGAGGTAGTAACGAAGGATTTGGGCTTTTTCCCAAGTCACTTAGGAGGGGGGAC
TTTTTCCCTTTAGAGGCATCTACACAGGAAGCGGGAGCATGTGGAGGAGGCAGCTTCGCCCAAGTCCGTTCCTCAAA
CCTGTGCTCCTAGAATCTCTGGCCAGGTAGTCATTTGAGCAACCTTGGCTTCTATAGAGATAAACTGGGAATAATAA
TCCCACCTGCCTCGTGGAATGACTGTTTCTGTGCATAAAGTGATTAGAACAGGATTTTGCAAAGAGTGAGCACTCAG
TAAGTGTCAGGTTCCACCCCACCACGACCACCAACACCGTCATGTCATCATTATCATGTTTGTCATCGTCTTCATCA
CCATTATATCTTCCCTCCATTTCCTCAGCACAGAAGCCTTGTATGGCTCCCCACTGCCTATAAAATCAAGTCCAAAC
TTTCCCCGACATGAAACTTTTAACTGCAGATACCAGTCTCTAAGAGTTTCCCAAACGGCTTTCCTCCCTCTGTCCCC
ACCACCCAGAAAGCCCTCCTCTTTCCTCCTCGCAGACTCTGCCCCATCTTTCTTTCTTTCTTTCTTTTTTTTTTTTT
TTTTTTTTTTTTTTGGTCTTTTTGCCTTTTCTAGGGCCGCTCCCACGGCATATGGAGGTTCCCAGGCTAGGGGTCTA
ATCAGAGCTGTAGCTGCCAGCCTACACCACAGCCACAGCAACACGGGATCTTTAACCCACTGAGCGAGGTCAGGGAT
CGAACCCGCAACCTCATGGTTCCTAGTCGGATTCATTAACCATTGCGCCTCAATGGGAACTCCTGCCCCATTTTTCA
AAGTCTAGCTCCAGGACGTCCTTCTCTGGGACATCCTCCCTGATTGCCCCATCCCACTTTACACCCTCTCCTGTATC
TCCTGCCATGATAACTGTCATCCTGTTGGCTCCAAGCCAGGTTCCACTTCATACAGTTTACAACTGCTTACTGAGTG
TCAGCTGTGTACTGACTACTGTGTTGACTGCTGGAAAGGCAAAGCCTATACGCCTCACCATCCATCCCTGAATTGTA
GGCATTACTTGTTCTCATCACGTAGAGGAGGAAACGGGGACCTAACTGGCCTAAGTTTGTACGGCTAGTAGGGTGAG
TGAGGGGTAGAGCTGAAATTTAAACTCAAACCCAAGACAGCTCTACTATACTACTGGCACTACTTTATAGTACTAGA
TACACATCATCCCTCTGATTAGGTTAAGAGCCCCTGAAGAGTCAGTGATCATTCATTCAGCAAACCTTTATGGACCC
CCATTGTGGGCCAGGTCTGGACAGTCATGACTGCCCAATGCCCAGCCCAAGGCCAGGCACACAATAAGCGTGAGGTG
AAAACTCACTGATTGACGGCACTTTTCCTTGTCTGGACAGCGGAACTGGACCAGTATGTTTTTCAAGACTCTCAGCT
GGAGGGCCTGGGCAAAGACATTTTCAGTAAGTTGGGGGGTGGGGGGTTCTTGGTTCAGCCTGCATTTCCTTCCTTGT
TCCTTAGGGGGCATGGAAATACCCAGAGGCCACCCTTCAATGAGAAGTCACGTTCCCTTCCCAGTGTAGGGACAATG
AGGGCTCATCTCGGACATCCTCTGACTGTGTGTCTTGGTGTCTTTGGTTTTTTCTCTGAAGTTGAGCACATAGGATT
GGAAGAAATGATCAGTGAGAGCGTGGAGGTGCTGGAGGACTCAGGGCGGAAAAGTCAGAAAAGATGTGAGTGAGCGT
GTTTCCCCCCCGCCCCCTGCCATCCAACCTCTCCTGGCTTCATTCCTGGCCCTGCCCTGGCTCTAAAACCTCCCAGT
CGCATTCCTTGTTAAGCCTTGCCTGCTCTGACCTGGCTTTGGGTGTCCCCCCACCTCTCCTCTCACCACTGCTCCCT
CGAGACCCAGAGAGGAAGCAAGTGGCCCAGCAGCAGATGGTCCCTCTCCTGGTGGGTCTCTGTTTTTGACTGTCATT
TCCAAAAGACCTCTGGGCTCTGGCTTCTCTTTCATCCTTAGTTGTCACCCCTGTATTTAAGGGAGGTCTCTTCAAGG
ACAGTCTTTCCCCAGCAAGATCTGGGTTTGAATTCCAGATCTGCTATTTAAGGTCTGTGTGACCTTGGGCAAATAAT
TACACCTCTCTGAGCCTCCTAGTCAGTCTGCCTGCCTCCTCTGTCTGTCCTCACCTGGCAGCCAACATGGGCTTTTG
AATGCAAATTCAATCATTTGGCTGGCCTGCAGACCCTCCAATGGCTCAAAATACATACCACAAGGATCTGTAGGATC
TGGCCCTTCCCCCTCTCCAAATTCACGAATGTGAGTCACTATGCTCCATCCAGCCACACTGGCTTCTTTCCATTCCT
GTAACTCTTGTACCCTTTCCAGCCTCAGGGCCTTTGCACTTGCTGTTGGCCCTGTCTGGAATGCCCTTCCCCCGTTT
CTTCCCATAGTGGCGCCTCCGAATCTTGTAGGTCTTGGCCAACATGTTGCCTCCTCCCGAAGGCCTTCTTCCATCAA
CTTTTCCACATAAATTAACCTTACTTACTTTCACCTTGTTTGTGTCTCTCCAGCATCACAGCCCTTGTCACAATCTG
GACTTGTTTTAGGTATTGGCTTTTGCTTAGTTCCCCCACCATGGGGACAGGGACCTTGTCTTTCTTATGTAATCACT
ACCTTCCCCAGCACCTGGTACATGCCTGGCATGCGGGAGCATCTCCATAAATATCCACTGAATGGAAATTTCCAGGA
GTTCCCATCGTGGTGCAGCAGAAAGGAATCTGACGAGTATCCATGAGGATTTGGGTTCAATCCCTGGCCTCGGTCAG
TGGGTCCAGAAACCAGCACTGCCGTGAGCTGTGGTATAAGTCGAAGATGAGGCTCAGATCCCGTGCTGCTGAGGCCT
TGGTGGAGGCCGGCAGCAGCCGATTTGACCCCTAGCCTGGGAATTTCCACATGCCTCAGGTGCAGCCCTAAAGAGCA
AAAAAAAAAAAGAAAAAAAAATTTCCACAAAATGGGCATCACAGCTAATTGAATGCTTACTCTAGGCCAAACCATGT
GTAAGCCCTGAACCTATTTAATTTGAACAGGTAAACAGATGCATGGCATAAAAATTCAAAAGGTGCGAAGAACAGTC
AGTAAAAAAAAAAAAAAAGAAAAAAGAGCTCCTTCCCACTCGTTTCCCAGTCTTTCATTTTCCCTCTCTGAAGACAA
TCTATGCTGCCAGTTTCCTTTTTGTCTTATATTTTGCCTAAAAGCCAGCTCTTTAAAACAATGTTGCCCCACAAGTG
GCATTTCACCCACCGTCTCGGGCACCTGGCTTTCTTCGTTTACCACGTCAGGACGGCGATTTCCACACCACGATGGA
AAACACGTGGTCCTCCCGCCCAGGAATTTCCCTTTCCTTTCCTTCTTTTTTTCCTTCCTTCCCCCTTTCTTCTTTCT
TTTCATTTCATAAGCATTTTCCCCCAATATTTTACCATGTGGTGTAGGGTGCAGACTACAAAATTTCTGTCTTTTTT
TGCGTGTCTTTTAGACCCCAGGCTAGGGGTTGAGTCCGAGTGTAGGTGCCGGCCTACACCACAGCCACAGCAATGCA
GAGTCTGAGCCTCGTCTGCAACCTACACCACAGCTCACAGCAATGCCAGATCCTTAACCCGCTGAGCGAGGCCAGGG
AGCGAACCTGCGTCCTCATGGATGCTAGTCGGGTTCGTTAACCCCTGAGCCACAACGGGAACTCCGAAAAATTTCAG
CATATAGTAGAGGTGACAGAATTGTACTACAAGCAACCACATACCCACTGCTGACAACCTACCATCAGTGTTGGGCT
ATATTTGCCTTAACACATCTCTATCCATCTGTCCATCCCTCTATCATCCACCCATCCATCCATTTTCCAGGGGAACG
TGTCAAAGGACGTTGCAGACGCCAGTACTGCCCACACATCCTTCCACATCCTTGTTATTTTTAGGGCTGCATGGTAT
TTCACTGGGGGATGAATCATCGTTTGTTTCATCAGCCCCTCGCTAAGGACACAGCTGGGTTTTTCTCTGTTGATGTG
TGCCGTGCTTGATATGCACTCACTGATTTCCAGTGCATTCCTGCAAAATGGGAATCAACACCCCTGTTTCACAGATG
AGAGAACAAAGGCTCAGAGAGGCTGTGTAGCAGAGACAACACGGCCAGGAAGGGCCCAAAAGCAGGTGGTTTGTCTT
TGTTTTTTTTGTTTTTTTTGGTGGGAGGTTGTTTTTGTTTCTGTAATGGCTGCACCCATGGCATACGTTTCCAGGGC
AGGGATTGAATCTGAGCTGCAGCTGTGGCAATGCCGGATCCTTTCACCCACTGCACCAGGCCAGAGATGGAACCTGT
GCCTTCACAGCGACTCGGGCTGCTACAGTCAGGTTCTTAACCCACTGTGCCAGGGTGGGATCTCCCACAGATGTTTT
TTTCATTTTTATTATTATTATTTTTAAACTCAAACTCTTCCTGTGTCTCTTCTATGGTTCTGCCTCTTCCAGTGCCT
CACTGCCCTGGGTGCTTCAAGATGGGGTTTGGGCTCAAGCAAAAGAGTGGGGGCAGAAATGGTCGGAGGAAGAGGAG
GGAAAGGGACCCCCCAGGCCACTTCCCAGCCATTTAAGGCAAGGCCACAAGGCCTAACTGGGGTCCACAGGCCCGTC
CTGGCTGGGTCTGATGACCGTGTGTTCTCTCTGAAGCTTTCCCGGAGGAGCTGCCTGCGGATCTGAAGCACAGGAAG
CTAGGTGAGCAGGGCGGGTGCATCCAGGGAGACTGCCAGGCAGGGAAGCTGGGGTCTCCTCAGGTGTGCATATAAAC
TAGCATTTAAAAGCTGAGGCTCAGAGAGGTGAAGCCACTTGTTCAACATCACACAGCAAGTGAGAGTTGGAGTTGGG
ATTCAGACTAAGATCATGAATCCACAGTGCGTGCTCTGCAGTTCAAGGACTGTTGGGAGATTCACCTCTACCCACAA
AACCTATTTTGAACTCTGAGTCAGAGCTGAGGACCCCCCCACCCCACCTTGTTCCACTGCCCCTCCAGGCCACAGCT
CTCCTTTCGGAAGGCAGCGTCACCTCTGGTCAGCTGGTTACCCGGCGGTTCCCCCCTCCCATGCCTCAATGAGCCTC
TTCCCCATGCCTCCATCCCCCCCCCACCAGATGCTTCCTCCCCTCCCTTCCTCCCTCCTCCCTGATTCGGTTGTTAT
TGCAAAGGTGGGGAGGCCAGCTCCCCTGTGAGAAAGAGACTGAGAAATGAAAGCCTCATAGTCTGATGGAGGAAGCC
TGGTCTCTACTCCCAGGTCTAATCTGATGGAGAAGACAGGGACCCCAACCAGGAGGACCCCAGCGTGATGGAGACCC
CCAATCTGATAGGGGAGGCGAGTCTCCGCCCTCCTGAGCTCCTGATTCAATGGAGGAGATAAACTCGTGCCCCAGGG
AGACAGCAAGTGCTCGAGGTCCCTGGAGGCTATAGAAGGTGGTAGGGGCCTGGGCTAACACCCTCTTCTTAGGTGTG
TCCCGCCTGCGCCCGGCTCTCCAAGGCAGGAAGTGCTCAGGGAGGAAGCCGGGGGTGGGGGCTGTGTGACACAGCAC
AGTTGCTGCTCAGACCAGCTTCACCCAGGACTGAGAAGAGGACAGGAATTCCCTTCCACTGCCAGCAGAGAGTTCCA
CTCTGCTCCCTGAGCACTCCCCACCCTGGGAAGGACCCTCAGGGCACCCACCCAGATCTTACCAAGCCTCTGACACG
GCCCCCTTTCTCATAGCCGAGCCCCTCGCCATGCCCATGGTGACTGGCACTTTCCTGGTGGGGCCAGTGAGCGACTC
CTCAGCTCGACCCTGCCCATCACCTCCTGCTCTGTTCAACAAGGAATCAACACCCAGCCAGGCCCAGCTGGAGGACG
CTGTCCCAATGCCGGGTAGGTTAGGGGCTTGGAGGGGCAGGGCTTCCCCTTCCCGCCTCCCCGCAGGTGCCTGAGGA
GTGGCTACTTCAGGAGCCACAAGGGACAGGAACTGCTCCCCCTACTACTGTCACCCACTTCCATCCCAGCCAGTCCT
ACCCCCCAGGGTCCCCCTCGACTCCGTCTGTGCCAGAGAATGTGCCCTGGGCATCACAGCAGGGAATCCCTGCCAAC
CAGGGAATTCACTGCCAGCCCTATGCTAGTTCGCTTGCTTTCCTCAGCAGTGAACCGTGCACCCTCTCTGGGCCAGC
TGCTCTGCTGGGTGCCAGCAACACTGTGCTGGGCCAGCAGACAAAGCTTTTCAATCTCCTCCAGGCTCTCTCGATTA
GAGTCCTTGAGAAGGGAGTCAGATGTTAATTAAGATGCTCAAGTGCTGGGAGTTTGGAGTTAATAGATGCAAACTAT
TGCCTTCCTGCGTGGATAAGCAATGAGATCCTGCCGCATAGCACAGGGAACTATATATCTAGTCAGTCACTTGTGGT
GGGACATGGTTAAGGATGATGTGAGAAAAAGAATGCATACATATGTACAGCTGGGCCACTCTGCAGTACAGTAGAAA
TTGACAGAACACTGTAAATCAACTATAATGGAAAAAAATAAAATCTTTCAAAAAAAAAAAAAACAAAAAACAAAAAA
GATGCTAACGGAGAACCCTACCTTACCATCTTGGTCTCTTGCAGCGCCCCCTTCAGGTTCCTTGTTGAGCTGCCTGA
GTGTCCCTGCTGGACCTATTCAGATCATCCCCACGCTCTCCACCCTGCCCCAGGGGCTCTGGCACATCTCAGGGGCC
GGGACAGGGGTCTCCAGTATACTCATCTACCAAGGTGAGCGTGGGAAGCCAGGCTCCCCACCCCCTCTGCCTGTGAC
CTGACTATTCCCTGACGCCATCCTTTTCCCACCCCAGGCATTTAGTGCTTACAGCCCAGCACCTTCTCAGGATCCTC
CGTCCCCATTTCCCCAAACTCAAAAGAGAGGAGCAAAGCTCCCGCGTGTTCTAAGCGACCCAAGTGCCTAAGTGACC
TTTTTTGGTCACTTTTCTCCACGAAGCCTTAGTTTCTCCCTTTTAAGAAAAATAACTTCATTATACTTTAAAATCCA
AATATTTATGTATGCTCATTAAGAAACCAAAAAATAAGACCTACTTACAAGAGTCACGGAGTCTCCCCATCGCTCTT
TTTAGTATACCGTTGTGAATAGTTTGGTATGGATCCTTGCACAGCTTTCTCAAAGTTGTCTTGTTTCCGGGTCTGTA
AGAAGGTCCTTGCTGACCTGCCACATTGGAGGGTTTTAAATTGTCCAAGGGAAGGCACGTTGGGCTCTCAGGGATGG
GAGAGAGAATGAGGCTAAGGAGATATTTCCACTCAACTCAAGAGCATCCTTTGAGGACTTTCCACTGTGGCACAGCA
GAAATGAATCCAACTAGTATCCATGAGGATGTGGGTTCAATCCTTGGCCTCCCTCACTGGGTTAAGGATCCTGTGAT
GCTGTGAGCTGCGGTGTAGGTCGCAGACACGGTTCGGATCCTGCGATACTGTGGCTGTGGTGTAGGCCGGCGGCCGT
AGCTCCGAATCAACCCCTAGCCTGGGAACCTCCATGTGCCGCGGGCATGGCCCTAAAAAGCAAAAAAAAAAAAAAAC
AGTAGAACTGCGCTGCCGCTTGGCTCACAGTCTCCGGTTTTACGGGAATGGGGTTAGTTTCTGGGTGGTCTATGGCC
AATTGTCTTGCCTGACCCGTGCTTGGTCCGCCTCGCGCGGGGACTTTCTGGGTGGCGCACACACCTCTCAGCCAAGA
TGGATTCCAGCGCCAAGGATCCTGGGAAGTTGGTGGTCTCCTCCCTCCCACAGGCCCCTCCCACGGGCCCCTCCCAC
ATCCTCCCGGTTAGTCTTCAGGGCAGCAGCACATTCCTCACGGGGCCTCCTGTTTCGAGACACCTCCTGCTAGTGGT
TGTTATCCTGCCTGGCCGAGGTGGACAGTTTCGGCCAGTCGTCCCCTAACAGAAGCACTTGCCCTGCTCCCAAGGAG
CTGGTTGTGTCCCTTCACAGATGGGGAAATCAAGGCTCCGGGAGCTCCATGTCACTCCNNNNNNNNNNNNNNNNNNN
NNNNNNNNNNNNNNNNNNNNNNNNNNNNNNNNNNNNNNNNNNNNNNNNNNNNNNNNNNNNNNNNNNNNNNNNNNNNN
NNNNACGAGAGCCAGAGCTCCAGCAGCTTCCAAGTGGCCAGGTGAGTGGTGGCAGGGTCCCTCTGCCCAGGTGCTGG
ACGTAGAAGCCCAAATCCGACTTCCCTTCATGCATTCACCCAACACTTGTTCAATCTCTCTTTTGTTGGCTCACTCA
TTCATTCATTCACTCATTCATTCACATGCTCATTGCATCTTCACATCATCTCATCACTCATTCCTCTGGTTATACCT
ACATTTAAAGCTACCTTTACCGAGGACCTGCCCCGGGGAAGCCCATGCTGGGCGTCAATATCTTTTTTTTTTTTTTT
TTGTCTTTTTTTTTGTTATTTCTTTGGGCCACTCCCGCGGCATATGGAAATTCCCAGGCTAGGGGTCTAATCGGAGC
TGTAGCCGCTAGCCTACGCCAGAGCCACAGCAACGCGGGATCCGAGCCACGTCTGCAACCTACACCACAGCTCACGG
CAACGCCGGATCGTTAACCCACTGAGCAGGGGCAGGAACCGAACCCGCAACCTCATGGTTCCTAGTCGGATTTGTTA
ACCGCTAAGCCACGACGGGAACTCCTGGGCATCAATATCTTGTTAGCGAGGCTGAGAGAGTGAATGAAGGGAGCGTG
GGTGACCGAGGGAACTAAGACAGGAGTGGGGATGAAAGGGCAGCTGACTGCTGAGTCTGACTCTGTCCCTGGTACTC
CAACACAGGAGATGTAGTAAATCAGGAAAGTCCCAACCTGACTATGGTCCCCATTTTGTGGAGGAGAAAACTGAGGC
ACAGTGGGGTATCGCACATGCTCAAGATAATACTAGTAAGTGGTGGAGCCAGGACTTAAACCAGAAACATGGATTCC
ACTATCTTAACCCTCAACACACACACACACACACCTCCCCAGAATGGTCTCCCAATCGTGAGTGAGCAAAAGAAGAA
AATCTTGGAGTGGGTAAATGATGGAGAAGATGAGGGAATGAATGAGCGAATGAGGCAGCTAATCCAGAAAGCCATCA
GGGAAGACGGGTGAATGGACGAAGAAGCTAGTGATGGTGGCCGGGCTGGCCTCTCGGCTGCCCTCCTGGTAGCCGGT
CCTGCCACTAGCATCCTCCCCTCCCCCACTCCCGCCTTTGACCTGTGCAGAGACTGTGGAGCAGTTCCACCACTCAC
TCCGGGACAGGTACCAAGCCAAGCCCGCAGGCCCGGAAGGCATCCTGGTGGAGGTGGACCTGGTGAGGGTGCGGCTG
GAGAGGAGCAGCAGCAAGAGTCAGGAGAGAGAGCTGGCCTCCCTGGACTGGGCAGAGCGGCAGCCAGCCCGAGGGGG
TCTGGCGGAGGTGCTGCTGGCCGCTAGCGACCGCCAGGGGCCACGCGAGACGCAGGTGATCGCCGTGCTCGGCAAAG
CAGGACAAGGGAAGAGTCACTGGGCCCAGGCCGTGAGCTGGGCCTGGGCTGACGGCCAGCTGCCACAGTACGACTTT
GTCTTCTGCATCCCCTGCCACTGTTTGGACCGGCCGGGGAACACCTACCGCCTGCAGGATCTGCTCTTCTCCCTGGG
CCCACAGCCCCTGCCCATGGACGACGAGGTCTTCAGTTACATCTTGAGGCGGCCGGACCGCGTTCTGCTCATCCTGG
ATGCCTTCGAGGAGCGCGAAGCCCAGGACGGCTTCGTGCACAGCGCGGGCGGACCCCTGTCCTCAGAACCCCGCTCC
CTTCGGGGGCTGCTGGCTGGGCTCCTCCAGCGCAAGCTGCTGCGAGGCTGCACCCTGCTGCTCACGGCCCGGCCCCG
GGGCCGCCTGGCCCAGAGCCTGAGCAAGGCCGACGCCCTGTTTGAGGTGGCCGGCTTCTCCGCACAGCAGGCCAAGA
CCTACATGCTGCGCTACTTTGAGTGTCGGGGGGCCCGTGAGCGCCAGAAGAGAGCCCTGGAGCTCCTCCAGGCACAG
CCGTTTCTCCTGAGTCACAGCCACAGCCCTTCCGTGTGCCGGGCCGTGTGCCGGCTCTCAGAGACCCTCCTGGAGCT
GGGCGAGGAGGCAGAGCTGCCCTCCACGCTCACCGGCCTCTACGTCGGCCTCCTAGGACCAGCGGCCCGCGAAAGCC
CCCCGGGTGCCCTGGTGGGACTGGCCAGACTGGCCTGGGAACTGGGCCGCCGTCACCACAGCAGCTTGCAGGAGGGC
CAGTTCCCATCGGCAGAGGCCAGGGCCTGGGCTGTGGCCCAAGGCTTGGTGCAGCGTGCCCCGGGGGCCCCGGGGGC
CCCTGAGCTGGCCTTCTCCAGCTTCCTCCTGCAGTGCTTCCTGGGGGCCGTGTGGCTGGCTCTGAGCAGCGAGATCA
AGGACAAGGAGCTGCCGCAGTATTTGGCATTAACCCCTAGGAAGAAGAGGCCCTATGACAACTGGCTGGAGGCTGTG
CCACGCTTTCTGGTCGGGCTGGTCTTCCAGCCTCGCGCCCGCTGCCTGGGAGCCCTGGCAGGGCTGGTGGCAGCCAC
CTTGGCGGACCGGAAGCAGAAGGTGCTCAACAGGTACCTGAAGCGGCTGCAGCCCGGGACCCTGCAGGCAGGGCGGC
TGCTGGAGCTGCTGCACTGCACGCACGAGGCCCTGGATTCTGGGCTTTGGCAGCATGTGCTGCAGGGGCTCCCGACC
CAACTCTCCTTTCTGGGCACTCGGCTCACGCCTCCGGACACCCACGTGCTGGGCAGCGCCTTGGTGGCTGCAGGCCG
AGACTTCTCCCTGGACCTCCGCAGCACTGGCATTGACCCCTCTGGACTGGGGAGCCTCGTGGGACTCAGCTGTGTCA
CCCATTTCAGGTGGGGGCCGGGGACAGGAGAGAGGGCTTCTTTGCATTGAGCACCTACTGTGGTTTTGCTGCTGTGC
CCAGTGCTGGCTCTGTGGGGTCTCATTCAGTAGGCATGGCAGCCAGATGTGGGCAGAAGTGATTCCACTCATTTGAA
GATGAGGAAGCCAAGGCTCAGAGAGGGAGAGTAGCTTGCCCGAGGTCACACAGCCAGTGAGAGGCAGCATCATTCTT
TTAACCACTGTTTGAAAGGGCCATGTTCCAGGCACTGGGCCATGTCTAGAGTCTAAGACTGATCTGGGTTCAAATTC
ATTTTCTTCTCTCCATCCCCTGATCAAGTCACCATTTTGTCATGGTTAGATTAAAACCACAGCCTCCCCTGACTTCC
CTGCCCCCGTTCTCGCCTCTTCCACTCCATTTTATTTTATTTTATTTTATTGGTTTTTAGGGCTACACCTGTGGAAT
ATGGAAGTTCCCAGGCTAGGGGTTGAATCCGAGCTATAGCTGCTGCCCTACACCACAGCCATAGCAACGCAGGATCC
TTAACCCACTGAGGGAGGTCAGGGATTGAACCACATCCTCATGGATCCTAGTCAGGTTCGTCACCACTGAGCCATGA
CAGGAACTCCCCCACTCCACTTTATTCTTAACCATCAGAGCAATCTCCCTAGTAATTGCATCTGATCATCTTTCATC
CTTGCTTACAATCTTTTAGAGGCACTCCACCTCCCTCAGGTTGAAGTCAAAGTTCCTTAATTTAAGGAATCTAAATC
CTCCTGTGATCTGTTTGATCCCTTAAGCCTTATTTCCAGAGAATCTCTCCTACCTTCCCTCTAAGCATATTTTACCA
GAGCTATAAGGTCTACACCATTGTAATGGTTCAACGGAGAATTCAGCACTGAGCTTCCTGGTAGCCAAAGCAAAAAG
GAAAAGAAAACCCAGGAGAGCTAAGAAAAAGGAGGAATTGATAAGGGCTTAAGTGGTCATGGAAGGCTTTCTAGAGA
AAGTAGGGGGTTAAGCTGAGCAAAGAAAGTACCTGAATAGGTAGGAGGTCCCTTCATGGAGTTGCCCATCCGTTATG
GTCTAGCCCGGTCACCATGCCTGGGTCTGAGGCCCTTCCTCCACAGGGCCGCCTTGAGTGACACAGTGGGGCTGTGG
GAGTCTCTACAGCAACGTGGGGAGACCAAGCTACTCCAGGCACTGGAGGAGAAATTTACCATTGAGCCTTTCAAGGC
CAAGTCCATGAAGGATGTGGAAGACCTGGGCAACCTCGTGCAGATCCAGAGGTGAGGAGGAAAGGGCACGGGAGGTG
GTCCAGGCCATGCAGGTCCATTACATTTGTCATTAGCACTTCCAGTGCCTCATCTTTGGGGGATATCCCATGTCCTC
CGCTTGGACAGTGGCCACCCAGAATCTCTCACTGTTGTCACCACCCATGCAGAACTCCCAGGATTTATCACTTGGTC
CCATTAAAAACTTGCAGTCATGTTCCCAATTTTTTTTTTTCTTTTTTAGGACCACACCTTCAGCTTATGGAAGTTCC
CAGATGAGGGGTCAAATCGGAGCTATAGCTTCTGGCCTATGCCACAGCCACAGCCACAGCAATACCAGATCCAAGCC
ACATCTGTGACCTACACCACAGCTCATGGCAATGCTTGATTCTTAACTCACTGAGTGAGGCCAGGGATCGAACCCGT
GTCCTCGTGTGTACTAGCCAGGTTTGTTACCCCTGAGTCACAATGGGAATCCCCCTAATTCTTTCTCAGCTAAAGCC
AGGGAACTATTCTCTGCTGCTAAGAGTTCACGAGCTGCCTTCTGCATCTAGTAACAGAAGTGACACTATGGCCACCT
TTCAAGGCAGCCAGGACCAGTATCATCCCCATTTTTTTGATGGCAGAGATCTAATGTCTAGTGGGTAGAGGACACTT
GACCACAGAACAACTGCCTTTCCCTCATTCCTTCATCATACATTGTTCGAGCACCTACTATGTGCTGTCTGGGATGG
GATGGGTCTCCTCTGAGGCTCTTTTCCATGAAACACACAGGAATATTAGCCTTCATAACATCCTGTTCTGAGGCTTT
TCTTTTTAAGAAGGGCATAACAAGGAGTTCCTGTGGTGGCTCAGCAGGTTAAGAACCCAGCTAGTCTCCATGAAGAC
AGGGGTTCAATCCCTGGCCTTGCTCAGTGGGTTAAGAATCTGGTGTTGTGTGAACTATGGTGTAGGTCGCAGACACA
GCTTGGGATCCCACGTTGCTGTGGCTGTGGCGTAGGCCAGCGGCTACAGCTCCAAGTCCCCCCCTAGCCTTGGAACT
TCCTTATGCCACAGGTGCAGCCTTAAAAAAAAAAGAAAAAAAAGAAAAAAAAGAAGGGACTAACCATAGCCCGGGAA
AGGCAGTCCTTCTGGGGAATTTTGGGAATGTGGCATGCATCTTAGTACATTTAGGAAGGGACTCAGCGACAGGTGAA
GGTCCCCTGACATTGCCCATTCTCTCCATCTCTCCAGGACGAGAAGCTCTTCTGAAGACATGGCTGGGGAACTCCCT
GCTGTCCGGGACCTAAAGAAGTTGGAATTTGC

| | |
|---|---|
| SEQ ID NO: 21 | CIITA cDNA Sequence |

TTTTTTCACTTCACGTTTTGGATGCTGCAGGCCGGGTAAGCAGAGATCCCAAGGCTCTGGCCCCCGGGGAAGAGGCC
CTGTCTCCGAGCCCTACCATGAACCACTTCCAGACCATCCTGACTCAGGTCCGGATGCTGCTGTCCAGCCATCGGCC
GAGTCAAGTGCAGGCGCTCCTGGACAACCTCCTGGCGGAGGAGCTTCTCTCCAGGGAGTACCACTACGCCCTGCTCC
AGGAGCCTGACGGTGAGGCTCTGGCCAGGAAGATCTCCTTGACACTGCTGGAGAAAGGAGCCCCAGACCTGGCCCTC
TTGGGGTGGGTCTGGAGTGCACTGCAGACCCCAGCAGCCGAGAAGGACCCCGGCTACCAGGAACCTGATGGCAGTGG
ACAGTGCGCCACCATGGAGTTGGGGCCTCTGGAGGGTGGGTACTTGGAGCTTCTCAACAGCAGTGCCGACCCTCTGC
AGCTCTACCACCTCTATGACCGGATGGACCTGGCTGGAGAAGAAGAGATCGAGCTCTGCTCAGAACCTGACACGGAC
ACCATCAACTGCGAACAGTTCAGCAGGCTGTTGTGCGACATGGAAGCAGATGAAGAAACCAGGGAAACTTACGCCAG
TATCGCGGAACTGGACCAGTATGTTTTTCAAGACTCTCAGCTGGAGGGCCTGGGCAAAGACATTTTCATTGAGCACA
TAGGATTGGAAGAAATGATCAGTGAGAGCGTGGAGGTGCTGGAGGACTCAGGGCGGAAAAGTCAGAAAAGATCTTTC
CCGGAGGAGCTGCCTGCGGATCTGAAGCACAGGAAGCTAGCCGAGCCCCTCGCCATGCCCATGGTGACTGGCACTTT
CCTGGTGGGGCCAGTGAGCGACTCCTCAGCTCGACCCTGCCCATCACCTCCTGCTCTGTTCAACAAGGAATCAACAC
CCAGCCAGGCCCAGCTGGAGGACGCTGTCCCAATGCCGGCGCCCCCTTCAGGTTCCTTGTTGAGCTGCCTGAGTGTC
CCTGCTGGACCTATTCAGATCATCCCCACGCTCTCCACCCTGCCCCAGGGGCTCTGGCACATCTCAGGGGCCGGGAC
AGGGGTCTCCAGTATACTCATCTACCAAGGTGAGATGACCCAGGCCAGCCAAGCACCCCCTGTCCATAGCCTCCCAA
AGTCCCCAGACCGGCCTGGCTCCACCAGTCCCTTCGCCCCGTCAGCAGCTGACCTCCCCAGCATGCCTGAACCAGCC
CTGACCTCCCGGGCAAACATGACAGAGGGCAGTGTGTCCCCCACCCAATGCTCAGGTGATCAAGAGGCCTCCAGCAG
GCTTCCCAAGTGGCCAGAGACTGTGGAGCAGTTCCACCACTCACTCCGGGACAGGTACCAAGCCAAGCCCGCAGGCC
CGGAAGGCATCCTGGTGGAGGTGGACCTGGTGAGGGTGCGGCTGGAGAGGAGCAGCAGCAAGAGTCAGGAGAGAGAG
CTGGCCTCCCTGGACTGGGCAGAGCGGCAGCCAGCCCGAGGGGGTCTGGCGGAGGTGCTGCTGGCCGCTAGCGACCG
CCAGGGGCCACGCGAGACGCAGGTGATCGCCGTGCTCGGCAAAGCAGGACAAGGGAAGAGTCACTGGGCCCAGGCCG
TGAGCTGGGCCTGGGCTGACGGCCAGCTGCCACAGTACGACTTTGTCTTCTGCATCCCCTGCCACTGTTTGGACCGG
CCGGGGAACACCTACCGCCTGCAGGATCTGCTCTTCTCCCTGGGCCCACAGCCCCTGCCCATGGACGACGAGGTCTT
CAGTTACATCTTGAGGCGGCCGGACCGCGTTCTGCTCATCCTGGATGCCTTCGAGGAGCGCGAAGCCCAGGACGGCT
TCGTGCACAGCGCGGGCGGACCCCTGTCCTCAGAACCCCGCTCCCTTCGGGGGCTGCTGGCTGGGCTCCTCCAGCGC
AAGCTGCTGCGAGGCTGCACCCTGCTGCTCACGGCCCGGCCCCGGGGCCGCCTGGCCCAGAGCCTGAGCAAGGCCGA
CGCCCTGTTTGAGGTGGCCGGCTTCTCCGCACAGCAGGCCAAGACCTACATGCTGCGCTACTTTGAGTGTCGGGGGG
CCCGTGAGCGCCAGAAGAGAGCCCTGGAGCTCCTCCAGGCACAGCCGTTTCTCCTGAGTCACAGCCACAGCCCTTCC
GTGTGCCGGGCCGTGTGCCGGCTCTCAGAGACCCTCCTGGAGCTGGGCGAGGAGGCAGAGCTGCCCTCCACGCTCAC
CGGCCTCTACGTCGGCCTCCTAGGACCAGCGGCCCGCGAAAGCCCCCCGGGTGCCCTGGTGGGACTGGCCAGACTGG
CCTGGGAACTGGGCCGCCGTCACCACAGCAGCTTGCAGGAGGGCCAGTTCCCATCGGCAGAGGCCAGGGCCTGGGCT
GTGGCCCAAGGCTTGGTGCAGCGTGCCCCGGGGGCCCCGGGGGCCCCTGAGCTGGCCTTCTCCAGCTTCCTCCTGCA
GTGCTTCCTGGGGGCCGTGTGGCTGGCTCTGAGCAGCGAGATCAAGGACAAGGAGCTGCCGCAGTATTTGGCATTAA
CCCCTAGGAAGAAGAGGCCCTATGACAACTGGCTGGAGGCTGTGCCACGCTTTCTGGTCGGGCTGGTCTTCCAGCCT
CGCGCCCGCTGCCTGGGAGCCCTGGCAGGGCTGGTGGCAGCCACCTTGGCGGACCGGAAGCAGAAGGTGCTCAACAG
GTACCTGAAGCGGCTGCAGCCCGGGACCCTGCAGGCAGGGCGGCTGCTGGAGCTGCTGCACTGCACGCACGAGGCCC
TGGATTCTGGGCTTTGGCAGCATGTGCTGCAGGGGCTCCCGACCCAACTCTCCTTTCTGGGCACTCGGCTCACGCCT
CCGGACACCCACGTGCTGGGCAGCGCCTTGGTGGCTGCAGGCCGAGACTTCTCCCTGGACCTCCGCAGCACTGGCAT
TGACCCCTCTGGACTGGGGAGCCTCGTGGGACTCAGCTGTGTCACCCATTTCAGGGCCGCCTTGAGTGACACAGTGG
GGCTGTGGGAGTCTCTACAGCAACGTGGGGAGACCAAGCTACTCCAGGCACTGGAGGAGAAATTTACCATTGAGCCT
TTCAAGGCCAAGTCCATGAAGGATGTGGAAGACCTGGGCAACCTCGTGCAGATCCAGAGGACGAGAAGCTCTTCTGA
AGACATGGCTGGGGAACTCCCTGCTGTCCGGGACCTAAAGAAGTTGGAATTTGCGCTGGGCCCTGTCTTGGGCCCCC
AGGCTTTCCCCAAACTGGTGAGGATCCTTGAGGCCTTTTCTTCCCTGCAGCATCTGGACCTGGACTCGCTGAGTGAG
AACAAGATCGGGGACGAGGGTGTCGCCCAGCTCTCAGCCACCTTCCCTCAACTGAAGGCCCTGGAGACGCTCAACTT
GTCCCAGAACAACATCTCCGACGTGGGTGCTTGCCAGCTGGCCAAGGCCCTGCCCTCGCTGGCCGCGTCCCTCCTCA
GGCTGAGCTTGTACAATAACTGCATCTGCGATGTGGGAGCCGAGAGCCTGGCGCATGTGCTTCCAGACATGGGGTCC
CTCCGGGTGCTAGATGTCCAGTACAACAAGTTCACAGCCGCCGGGGCCCAGCAGCTCGCCGCCAGCCTGAGAAAGTG
CCCTCACATGGAGACGCTGGCGATGTGGACACCCACCATCCCGTTTGGTGTCCAGGAACACCTGCAGCAGCAGGACT
CAAGGATATCCTGAGATGATCCAGGCTGCACCCGGGACAAGCACGTTCTCTGAGGACGCTGACCACGCTGGACCCTG
ACCTGATCATCTGTGGACACAGCTCTTCTTAGGCTGTGTCCCGTGAGCTTTGGCGATCTGGTGCCCAGCCCTGGTGG
CTCAGAGTCAGCCCCCACTCTGCTGGGGAAAGGACCCACGGCCTGCTCTGTGGACAGACCCCAGGCCCGGCCCCAGG
CTCCTTCGGGGCCCAGACTGATGTCAGCCTTGCTCAGCCGCTGCAGTCCTGGCAGACAGGCGGGCACCCAGTGGCAG
SYAGGGKCCACCCGGGAGCCCTGAAGCACTCCCTGCAGGACACTGCAGACAGTGGTGGCCAGGTCAGAGTGAGGGAT
GTGGCGGCCACATCACCTGCCCAGGTCCTGCTGGCCGGGGGAGAAAGCACCTCTCCACACTGCTCCCCTGGTGGGGT
AAGCTTGGCGCTCAGAAGATACCAGCCAGCACCCCCCAGCGTGTTGATTTCCCAAACGGTGACCGACGGGGTGTCCA
CGGCAGCTGCCCTCTGCCTCCGGCACCTGCGGGTTTGCACTCACTTTGTTTGCCGAGGCCAAAGCTGGGCCTGGCCA
GACACGCCRGACCTTAGCGGGGGAAGAGCCGACAGTACACTACGGGMCGAGGYRGGGTGGCGAGGGTCTGGAACCAC
ATCCGCCTTCTTGCCCTCACGTCCTGTGTCTTTTTTCACTACATTATACATGGCTTATTCAGTCTCA

| | |
|---|---|
| SEQ ID NO: 22 | CIITA Protein Sequence |

MNHFQTILTQVRMLLSSHRPSQVQALLDNLLAEELLSREYHYALLQEPDGEALARKISLTLLEKGAPDLALLGWVWS
ALQTPAAEKDPGYQEPDGSGQCATMELGPLEGGYLELLNSSADPLQLYHLYDRMDLAGEEEIELCSEPDTDTINCEQ
FSRLLCDMEADEETRETYASIAELDQYVFQDSQLEGLGKDIFIEHIGLEEMISESVEVLEDSGRKSQKRSFPEELPA
DLKHRKLAEPLAMPMVTGTFLVGPVSDSSARPCPSPPALFNKESTPSQAQLEDAVPMPAPPSGSLLSCLSVPAGPIQ
IIPTLSTLPQGLWHISGAGTGVSSILIYQGEMTQASQAPPVHSLPKSPDRPGSTSPFAPSAADLPSMPEPALTSRAN
MTEGSVSPTQCSGDQEASSRLPKWPETVEQFHHSLRDRYQAKPAGPEGILVEVDLVRVRLERSSSKSQERELASLDW
AERQPARGGLAEVLLAASDRQGPRETQVIAVLGKAGQGKSHWAQAVSWAWADGQLPQYDFVFCIPCHCLDRPGNTYR
LQDLLFSLGPQPLPMDDEVFSYILRRPDRVLLILDAFEEREAQDGFVHSAGGPLSSEPRSLRGLLAGLLQRKLLRGC
TLLLTARPRGRLAQSLSKADALFEVAGFSAQQAKTYMLRYFECRGARERQKRALELLQAQPFLLSHSHSPSVCRAVC
RLSETLLELGEEAELPSTLTGLYVGLLGPAARESPPGALVGLARLAWELGRRHHSSLQEGQFPSAEARAWAVAQGLV
QRAPGAPGAPELAFSSFLLQCFLGAVWLALSSEIKDKELPQYLALTPRKKRPYDNWLEAVPRFLVGLVFQPRARCLG
ALAGLVAATLADRKQKVLNRYLKRLQPGTLQAGRLLELLHCTHEALDSGLWQHVLQGLPTQLSFLGTRLTPPDTHVL
GSALVAAGRDFSLDLRSTGIDPSGLGSLVGLSCVTHFRAALSDTVGLWESLQQRGETKLLQALEEKFTIEPFKAKSM
KDVEDLGNLVQIQRTRSSSEDMAGELPAVRDLKKLEFALGPVLGPQAFPKLVRILEAFSSLQHLDLDSLSENKIGDE
GVAQLSATFPQLKALETLNLSQNNISDVGACQLAKALPSLAASLLRLSLYNNCICDVGAESLAHVLPDMGSLRVLDV
QYNKFTAAGAQQLAASLRKCPHMETLAMWTPTIPFGVQEHLQQQDSRIS

| | |
|---|---|
| SEQ ID NO: 23 | B4GALNT2 Genomic Sequence |

CACATGAACTGGACAGGCCCCAGGTACATAAGAAAAAGGCCCCTAGTCCAGTAGCCAATAGGATTCCTCCTTTCTGA
AAGTCACAGCGCTTTTCCTTCCTGAGCAGAGTGGGGGCGGGGGAATAAAGTTGCGGCCACAGAGTGGACTTGAGCTC
CCCCTGGAGGCCCAAACGATTATTTGCACCAACTTGTCCTGGCTTTTGGAGTTGAGCGGGAAGAATCCGAGGGTCTT
CATTCACCGTCCTGGAAGGATAGTTTTGTCAGTGGTTTTGGTCCAGGCTGCTCGGTTGTGCCTGAAAAGTCACGGCT
GAAGGGAGCGCTGTGTGACGGTTATTGTTTGTGCCTTGACTTTTGCTTCCAAATCAGCCCAAAAGAAACTCTGCTTT
TTTTTTTTCTTTTCTAGGGCCAAACCCATGGCATATGGAAGTTCCCAGGATAGGGGTCCAATCAGAGCTGTAGCCGC
CGGCCTACACCACAGCCACAGCAACGCCAGATCCAAGCCTCGTGTGGAGACTACACCACAGCTCACGGCAACGCCGG
GTACTTCACCCACTGAGCAAGGCCAGGGATCGAACCTGCAACCTCATGGTTCCTAGTCGGATTCGTTAACCACTGTA
CCACGACAGGAACTCCACCCTTTCTGTTTTGAAAGGCACACAGACAAAGAAAACAGTCGTATTTATTATTCTGGACA
CTTTGCTTCTAAGTCATAGGAAGCAACTCAGATTAGGTTAAAGAAAAATGGGGAATTATAAGGGCACTGTGTTTTAT
AAAATCCCAGGGCAGGACTGTAGCCAGAGCTCAGGAAAGAACCAGAAGGTTTTCAGAAGTCTCTCATTTCAGCTCAG
TGGTTAACACCCTCCGAGAGTTCCATTTTAACTTTGCTGTGGTGGCACAGCAGAACCCTCTCCCCAAGGAAGGTGAC
AGGAACGTCCTTAAAATGAGGAAGAACCGCATGGCCCAATCACCCTCTCTACACGTATGCACAGCCCAGACTGTACC
CAATAAGACTGCAATAAGGCTATATGTTACCATATAAAGGGGACAAAGGGGTAAAAATAATATAAAAGGCATCTCCT
CACTGTGCTCAGGGCTCAGCCTTTGGACATGAATCTGTCGAGCCAGTGCCGGCATGAATAAATACTGCTTCCTGGAA
AAAAGCCTTGGTGGGTGTCCCATCTCTGTACGTAAGTCCTACAACAGTTCCTTCCTGCTAGAGTAGAAGGTTCCAGA
TCCTGGGGCAGGGAAGAGGTTCCTAGAACCTACTGATGATAACTACAGCACATCAAAACAGTCCCTGCTGGGGGATG
TTGGAGCATGCAACAACTGCCATGAAAGTGGACAACTCTATCTCCCTGTATCAAGAGTGCATGTTTCAGGAGTTCCC
TAGTGGCTCAGAGGGTTAAGAATCTAACTAATATCTATGAGGATGCAGGTTTGATCCCTAGAATAGTTCAGTGGGTT
AAAGGATCTGGTGTTGCAGTGTAGATCAAGGATGTGCTTGGATCTGGTGTTGCTGTGGCTGTGGCACACACTGGCAG
CTGTAGCTCTGATTCAACCCCTAGCCTGGGAACCTCCATATGCCGAGGGTGCAGCCCTAAAATGACAAAAACAAGAA
AACAGGAATGCAAGTAAGTCAGGAGTTCCCTGGTGGTTCAGTGGGTTAAGGATCTGGCATTGTTACTGCTGTGGTGA
GGGTTTTATTCCTGGCCCAGGAACTTCTGCATGCCACAGGCACAGCCAAAATAAATAAATAAATAAATAATAAATTA
AGTGGAGTTCCCGTCGTGGCGCAGTGGTTAACGAATCCGACTAGGAGCCATGAGGTTGCGGGTTCGGTCCCTGCCCT
TGCTCAGTGAGTTAATGATCCGGTGTTGCTGTGAGCTGTGGTGTAGGTCGCAGACGCGGCTCGGATCCCACGTTGCT
GTGGCTGTGGCATAGGCCAGTGGCTACAGCTCCGATTGGACCCCTAGCCTGGGAACCTCCATATGCCGCGGGAGCGG
CCCAAGAAATAGCAAAAAGACAAAAAAATAAATAAATTAAATAAATAAATAAATTAAATAAATTAAGTAAAATTTAA
AATTTCTAGGAGTTCCCTGATGGTCTGGAAGTTAAGGATTTGGAGTTGTCGCTGCTGTGACTCAGGTTGAATCTCTG
GCCTGGGAACTTCTGCAGGCTGTGGGCACAGCCAAAAAAAAAAAAAATTAAGACAAAAAAACAAAGCAAATAATTCA
TCAGGAAGGCAGAAATTTTTTGGAAGCAGACCTAGGAGAAAATAAATATTTGTTTAAATATGTAAATGTTTATTTAT
ATTTTAACTATTTTATATATTTAACTTTCCTTTTTTTTTTTTTTTTTTTTTTGCTTTTTAGGGCCACACCTGAATTA
TATGGAAGGTCCCAGGGGAGGGGTCAAATCAGAGCTGCAGCTGCTGGCCTACACCACAGCCACAGCCACTCGAGATC
CGAGCCACGTCTGCGACCTACACCACACCACAGCTCACGGCAACGCCAGATCCTTAACCCATTGAGCAAGGCGAGGG
ATCGAACCTTCAATATCATGATTCCTAGTCAGATTTGTTAACCACTGAGCCATGACAGGAACTCCAGTCATCTTTTG
TTTTGAGGACATAAAGTAAGAGGTATAGAGAAGCACTTCCCCAGGGGTCTGAACAATGTATAGGCTATTTAGGGAAA
CAGGTGGTTATTATAACTGGAGGTTTGTACTTTTTTTTTTTGGTCTTTTTGTCTTTTCTAGGGCCAAACCCATGGCA
TATGGAAGTTCCCAGGATAGGGGTCCAATCAGAGCTGTAGCTGCCGGCCTACACCACAGCCCATAGCAACGCCAGAT
CCAAGCCGCGTGTGGAGCCTACACCACAGCTCACGGCATCACCGGATCCTTCACCCACTGAGCGAGGCCAGGGATTG
AACCCGAAACCTCATGGTTCTTAGTCAGATTCGTTAACCACTGAGCCACGATGGGAACTCCAGAAGTTTGTACCTTT
TGACCACCTTCAACGAGGGGCTATTTAGGGAAACAGGTTATGTTGTCCCAGTGCTGAGCCCTAGATCCCGAGATGCC
CAAATGTTCATCAGTAAATATATGTGTTTTTTTTTTTTTTTTTTGCCACACCAGCAGCACGCAGAAGGTTCTGGGCC
AGAGATCCAACCTGATCCACAGCACCGACAATGCCAAACCTTAACCACTAGGCCACCAGAGAACTCCTATGTATTTT
TTTCTTCCAGTTTATAATTCACCTACAGCACTGAATGAGTTGTAGAGCATAATGACTGGACTTGCATACGTCATGAA
ATGATTACCACAATAAGTTTAGTGAGTGAGTTCCCACTGTGGCTCAGCAGTAACGAACCTGACTGGTATCCATGAAG
ATGCGGGTTGGATTCCTGGCCTCGCTCAGTGCGTTTAAGGATCTGGCATTGCTATGGCTGTGGTGTAGGCGGGCAGC
TGCAGGTCTGATTCAACCCCTAGGCTGGGAACTTCCATATGCCACAGATGCAGCCTTAAAAAACACATAAAAATAAA
AATAAGTAAGTTTAGTGAACATCCATTAGCTCACATAAATAAAAAATTAAATAGAAAAAAATTTTCGTTGTGATGAG
AACTTATAGGATTTATTCTCTTAACCACTTTCTTTCTTTCTTTCTTTTTTTTTTTTTTTTGTCTTTTTGCCATTTCT
TGGGCCGCTCCCACGACACATGGAGGTTCCCAGGTTAGGGGTCCAATCAGAGCTATAGCCGCTGACCTACGCCAGAG
CCACAGCAACTCGGACGGAATCCGAGCCGAGTCTGCAACCTACACCACAGCTCATGGCAATGCCGGATCCTTAACCC
ACTGAGCAAGGCCAGGGATCGAACCCACAACCTCATGGTTCCTAGTCGGATTCGTTAACCACTGAGCCACGACAGGA
ACTCCAGACTCTTCTTTTTTTTTTTTTTTTTAAGGGCTGAACTCGAGGCATGTGGAGGTTCCCAGGCCAGGGGTCGG
ATCTGAGCTGTAGCTACCGGCCTATACCACAGCCACAGCAACACAGGATCCGAGCCACATCTGCGACGCACATCATA
GTTCACGGCAACACTGGATCCTTAACCCACTGAGCAAAGCCAGGGATTGAACCTGCGTCCTCATGGATGCTAGTCAG
ATTCAGTTCTGCTGAACAATGATGGGAACTCCCCATGCTGACTCTTAAGATAACAGAGAGAGCCTGCCTCATCATGA
TGGCCAGATTCTGTACTTGACATGGGTCTTGAATGGTCAGCAACTGATCTCAAGGCCCTGGAATTTAGTGGCTTAGC
CTTACACTGGCACCTCAGCAGAGGGTCCCAGATCAATCCCAGGCATTCTAGTAGGTGTCCTTTTTTTTTTTTTTTTT
GGTCTTTTTGCCATTTCTTGGGCCGCTGCTGTGGCATATGGAGGTTCCCAGGCTAGGGGTCCAATTGGAACTGTAGC
CGCCGGCCTACCCCACAGTCTCAGCAACGCGGGATCCGAGCCGTGTCTGCGACCTATACCACAGCTCACGGCAATGC
CGGATCCTTAACCCACTGAGCAAGGCCAGGAATCGAACCCGCAACCTCATGGTTCCTAGTCGGATTCGTTAACCACT
GAGCCACGACGGGAACTCCTCTTTTTTCTTTTTAATGGCTGCACCCACACCATATGGAAGTGCCCTGGCCAGGGGTC
AAACTGGAGCTGCAGCTGCTGGTCTACACCACAGCCACAACAACACTGGATCCAAGCTGTATCTGTGACCTACTCCA
CAGCTCGCGGCAACGCCGGATCTTTAACCAACTGAGTGAGACCAGAGATGGAACCCGAATCATCACAGAGACTGTGT
GGGGTCTTAATCCACTGGACCACAATGGGAACTCCGAGAATATGCCTTTATGGTAGGGAGTCTGACGCCTGGGAAAC
CTTTATTCTGGCAGGGCGTGGTTTACCGCAGTGATCGCCTCCCTCTAATTGCCTGCATCCCATCCCTGTGCCGGGCT
CCAGGTGAGCTGACTCCACAGAGCTCTCCTCACCTGCCGGGGCCCTTGTGACTTCTCTCTTCTCTGGTCCCCCAACC
CTGCTGCTCAATCCTACTAGCGGACTGAACCGAACGAGGCTGCCACCTCCTCAAGGCAAGGACCCTGGGTTCTTCAC
ATTATTTGAGTCCACAAGGTAGGACCAAAGGAAAATTTGTGGAGGACAGTGATGCTGGAGATGATCTGTGATATAAT
TTCCAGCAAGTAACCTTCAAGGACCCAGCAGCCATCTTTTTTTTTTTTCCACTGTACAGCAAAGGGATCAAGTTATC
CTTACATGTATACATTACAATTACATTTTTTCCCCCACCCTTTGTTCTGTTGCAACTTGAGTATCTAGACATAGTTC
TCAATGCTATTCAGCAGGATCTCCTTGTAAATCTATTCTAAGTTGTGTCTGATAAGCCCAAGCTCCCGATCCCTCCC
ACTCCCTCCCCCTACCATCAGGCAGCCACAAGTCTCTTCTCCAAGTCCATGATTTTCTTTTCTGTGGAGATGTTCAT
TTGTGCTAGATATTAGATTCCAGTTATAAGTGATATCATATGGTATTTGTCTTTGTCTTTCTGGCTCATTTCACTCA
GTATGAGAGTCTCTAGTTCCATCCATGTTGCTGCAAATGGCATTATGTCATTCTTTTTAATGGCTGAGTAGTATTCC
ATTGTGTATATATACCACATCTTCAGAATCCAGTTATCTGTTGATGGACATTTGGGTTGTTTCCATGTCCTGGCTAT
TGTGAATAGTGCTGCAATGAACATGCGGGTGCATGTGTCTCTTTTAAGTAGAGTTTTGTCCAGATAGATGCCCAAGA
GTGGGATTGTGGGGTCATATGGAAGTTCTATGTATAGATTTCTAAGGTATCTCCACACTGTTCTCCATAGTGGCTGT
ACCAGTTTACATTCCCACCAACAGTGCAGGAGGGTTCCCTTTTCTCCATAGCCCCTCCAGCACTTGTTATTTGTGGA
TTTATTAATGATGGCCATTCTGACTGATATGAGGTGGTATCTCATGGTAGTTTTGATTTGCATTTTTCTTATAATCA
GCGATGTTGAGCATTTTTTCATGTGTTTGCTGGCCATCTGTATATCTTCTTTGGAGAAATGTCTATTCAGGTCTTTT
GCCCATTTTTCCATTGATTGATTGGCTTTTTTGCTGTTGGGTTGTATAAGTTGTTTATATATTCTAGAGATTAAGCC
CTTGTCCATTGCATCATTTGAAACTATTTTCTCCCATTCTGAAAGTTGTCTTTTTGTTTTCTTTTTGGTTTCCTTTG
CTGTGCAAAAGCTTTTCAGTTTGATGAGGTCCCATGGGTTTATTTTTGCTCTAATTCCTATTGCTCTGGGAGACTGA
CCTGAGAAAATATTCATGATGTTGATGTCAGAGAGTGTTTTGCCTATGTTTTCTTCTAGGAGTTTGTCCTGTCATAT
ATTTAAGTCTTTCAGCCATTTTGAGTTTATTTTTGTACATGGTGTGAGGGCGTGTTCTAGTTTCATTGCTTTGCATG
CAGCTGTCCAGGTTTCCCAGCAACCAGCAGCCATCTTTTTGACTGAAGATACACTCTTCCCAGTGAGATGGAATCAG
ATGATGGGAGATACTATATGTACAAATGCTTCCCACATAGTAAGGCATCATAACACAGTAATTTTTGTTTATTCTTT
TTTGGTCTTTTTTTTTTTTATGGCCACACACTTAGCATCTGGAAGTTCCCAGGCTAGGGGGCGCATCAGAGCTGCAG
CTGCCAGCCTATGCCACAGCCACAGCAATGCCAGATCCTTAGCCCACTGAGCAAGGCCAGGGATCCAACTCGCATCT
TCGTGGATAGCAGTCTGGATTGCTACCTCTGAGCCATGATGGAAACTCCGCCGTAATCGTTATGAATGAAGTCTCCA
TTGCCCACCTCAGTGACTGGTCCATTTCTAATGACCCTGTACTTTTATTGGTACTTCCAGTAACGGAGTCAGACCCA
CCTGCCTACCCTGCTCCCTGGGCATTACAATGCTTATCTTATGAGGAGTTCAAATATTGGTATCCCAGCCACCGCAT
CCGCTGACTTAGATACTTGCAACCAGGCAGCTCAGCGCTTTTCCAATGCCCAGATACCTTAGGTGGCACATTGGAGA
TAGTTCTTGAAGTAGTGGAGAGCCAACTTGAATTTGATCTGGGCTTCGGTGTTGGCCCGATAACTGGTGTAGTTCCC
CTCCAGGGTGGCCAGCTCTGGGTCCATCACTGGTAAATGGGGCTGGTGACCTATGATCACATGTGGGCAGGACCCCA
CGAGCAGGCTCCCGAGCCCATCAATAAAGAACTCTGCCAAGAGAGGGAGAGAGCGCGAGAAGGAAACGTGAGCTTCA
AACCAGAGACCCGGGCCAATACTGCGACTCTGGGAGGAGGGCTGGGGTGGGGGGGGACATAGCTTCTATTCTGGGGA
GGTTCAGTCCCATGGCAAAGCCACTGAGTTGGAAGATCAGACAGATATCAGCAGAGAGACACAGATTAGCAGACCCC
AGGACTGGGAGGAATGAGAGGGGAAGAGGTGGGGTGCTGCTCACCAGCTGCAGCTAAACAGAGAAGGATGTCTGGAA
AAGGAGGAGCAGGAAATTCCCGTCATGGCGTAGTGGTTAATGAATCCGACTAGGAACCATGAGGTTGTGGGTTCGGT
CCCTGGCCTCGTTCAGTGGGTTAAGGATCTGGCGCTGCCCTGAGCTGTGGTGTAGGTCACAGAGGCAGCTCAGATCC
CGTGTTGCTGTGGCTCTGGCATAGGCCGGGAGCAAAAGCTCCAATTCGACCCCTAGCCTGGGAACCTCCACATGCCA
TGGGTGCAGCCCTAAAAAGGCAAAAAAAAAAAAAAAAAAAAAAAAAAAGGCAAAAAAAAGGAGGAGCAGCAGCAAGA
CAAGGAAAGAGGGAAGGGGCAGAGCTGCAGGGAGAGGAGGTAGAAGGGTGTCTCGGAGAAGCAGGAATAGCCTATGG
GAGACACGAAGGTGGAGGGAGGCAAGAGAGACCAAGAGCTCCCTAGTTTGGGGAGAAGGGGCTGCTTCCCTGAGCAG
CAGGGCCCCGCCCTCCCTCAGAAAGAGACTTCTGAAGCCAGCGCACAGCCCAGCTCGCTTCTTGCCCTTCCAGCCTC
CCCACCTGAGTGAGCCACTCGCTGCAGCCGGGGGTCGAAGCCAATTCTTTGGAGTCGCTCTGTGTGAGCCAGGAAGA
AGTTGACAACACCACTGGTCACCACGCAGTCGGGGAAGCCATCCACGGGCCGGAAAAATCCTGGCTGCTGGTGGAGA
CAGTCGCCATTCTTCCCCTGCTCCAGCAACAGCTTGAACTGGAATGTGTTTTCAATCACGCTGCCACCTACCTAGCC
AGCGGGAGGAGAAATCTGTTAGAGAACAGACTCCATATCCAAGGAGCCTGTGCCAGGAAGCCTTACTGGACTGAACC
TCAGTCACGACAAGAATTGCACTCCCTGGAGTTCCCGTTGTGGCTCAGTGGTTAACGAATCTGACTAGGAACCATGT
GGTTTCGGGTTCGATCCCTGGCCTCCCTCAGTGGGTGAAGGATCCGGCGTTGCTGTGAGCTGTGGTGTAGGTCGCAG
ACGTGGCTCGTGAGCTGTGGCATAGGCTGGTGGCTACAGCTCCAATTGGACCCCTAGCCTGGGAACCTCCATATGCT
GCGGGAGTGACCTAAGAAATGGCGAAAGACCAAAAAAAAAAAAGGTAATAATAATAATAAAATAAAATAAAATAAAA
AAGAAAAAGAATTGTACTCCCTGTCTTATCTACCCTTCATGTTACACTTCCGCCAAGTCCAAAGGGCAGCAAAGTTT
CTGCTGCACTTACCCTCCAGCAAGCTCACTCTTTCCAGAGGGCCACTCCCTCCCCTCCCTTCTGCTACAAGGATCCA
GGAGGATCGAGGATGGGGGATCGCGTTTGGGTGCAGGTGAGAGGCAGCCAGCGTGCAGCCGTCCCTACGTGGACTTC
CTGAGCAAGCCTTTGTCTCAAGTTGTCTCCCTCCCATTCTCTGCCCCTGGCTCACTTCTCTGCGCCGTCTGTCCACA
CACCACACACTCCTGGGAGCTCGCAGCTTTGTGTGAGCCCGAGCACAGCAGGACAAGCAAGTACATCTATTCCTGAA
CCATCATAATCACCTAGGGAGGCAGAGCAGAATCTGCCAGTTGCCCCCCACCCCCTCGCCTGTTCTTTCCTTCCTCC
TCTTAGGAAATGAGCCCCCTGAGGTGTTTTTTGGTTTTTGTTTTTCCTTTTTCAGCTGCCCCTGCAGTTCCCAGGCC
GGGGATGGAATCCAAGCCAGAGCTGCACCCACCCCACCCCCACGCAGCAACGCTGGATACTTAATTTAACCCACGGC
ACAGGACTGGGGATTGAATGGGCACCTCCACAGAGACAAACTGGATCCTTAACCCCCATGCCACAGTGAGAACTCCA
AACTCCAAACCCTCTGAGATTTAAGTGGACTAAATTAAGCGACAATGATCCTACGAAAGATGAAATTTCCCCACTTC
TCTGGAGTTCCCAATGTGGCTCAGCGGTAATGAACCTGACCAGTATCCATGTGGACGTGGGTTCACTCCCTGGCCTC
CTCGAGTGGGTTAAGGATCCGGCATTGCCGTAAGCTGTGGTGTAGGTCACAAAATCAGCTCAGGTCCCATGTTGCTA
TGGCTGTGGTATAGACGGGCAGCTGCAGCTCCAACGGGACCCCTAGGTTGGGAACTTCCATGTGCCCTACAAAGAAG
AAGGGAGGAAGGAAGGGAAAGAGGGAGGGAGGGAAAGAGGAGAGAGAGGGAGGGAGGAAGGAAGGAAGGCAGGGAGA
AATGGCCCACAGCATATGGCTTGAATCCCAGCTGCAGCTGCAGCAATGCCAAATCCTTTAACCCGCTGGACTGAACC
AGCACCTCTGCAGCAACCCGAAATGCTGCAGTCGGGTTCTTAACCCACTGTGTCACAGTGGGAACTCCCTGAAAGGA
TGTGATTTAGAACAGATGTCTCCAATTTTTAAAAAGACCACATTCTTCTCATCTTTTCCTTTTTTTTTTTTTTTTTT
TTTGGCTTCTTAAGGTTGAACCCACGGCATAGGGGGTTAGTGGTTAGTTTCCAGGCTAGGAGTCAAATTGGACCCAC
AGCTGTTGGCCTACACCACAGCCACAGCAACGCCAGATCCAAGCCTCGTCTGTGACCTATACCATAGCTCCCAGCAA
TGCCAGATCCCTGACCCACTGAACAAGGCCAGGGATCGAACCCACATCCTCATGGATACTAGTCAGATTCATTTCTG
CTGCGCCACGAAGGGAACTCCCAAGACCACATTCTTAAAAGAAAACTGTTGTCTTCTACTCCCTCTCTCCCCCTTTC
TTCTGACCGTGCAGCTGAGGGCCACAAAGATGGATGAACAACAGGGAAGGAAGCTGGACCAGGATGACCCTGGAAAG
AGACAATAGGGCCAGCTTGCATTCTCTCTTTTTTTTTTTTTTTTTTTTTTTTTGGCTTTTTGCTAATTCTTGGGCCG
CTCCAGCAGCATATGGAGGTTCCCAGGCTAGGGGTCCAATCGGAGCTGTAGCCGCCGGCCTACGCCAGAGCCACAGC
AACGCGGGATCCGAGCCGCGTCTGCAACCCACACCACAGCCCACAGCAACGCCGGATCGTTAACCCACTGAGCAAGG
GCAGGGACCGAACCCGCAACCTCCTGGTTCCTAGTCGGATTCGTTAACCACTGCGCCACGACAAGAACTCCCCAGCT
TGCATTCTTACACGGGTAGGAACTGCACCTTTTTTGTCATTTATGCTATTGTGACTGGGTCTCTAGAAGAGTAGCAA
AGAGACATCTTCGTCAATCCAGATGTTTTGGGGGACTGTCCACCTGGAATAAGAGATAACTGTGGTCACGGTGCTAC
TTATCCACTTTCTTTCCAGGCCGGGATAGAACCAGCACCACAGCAGTGACAATGCTGGATCCTTAACCCTATGAGCC
ACCAGGGAACTCCCATCTTTCTTTTTCCAAACAGCTTTATTGAGATATCTTTGATATATTAAAACTGTATGAAGGAG
TTCCTGTCGTGTCTCAATGGTTAACAAATCCAACTAGGAACCATGAGGTTGCGGATTCGATCCCTGGCCTTGCTCAG
TGGGTTCAGGATCCAGCATTTTTGTGAGCTGTGATGTAGGTTGCAGACGCGGCTCGGATCCTGCGCTGCTGTGTCTC
TGGCGTAAGCCGGTGGCTGCAGCTCCGATTGGACCCCTAGCCTGAGAACTTCCATATGCCGCGGGAGCGGCTCAAGA
AAATGGCAAAAAGACAAAAAGACAAAAAACAAAACAAAACAAAACAAAACAAAACAAAAAACTGTATGTATTGAAGG
TGTACAGCTTGATTTTTTTTTTTTTTTTTGGTCTGTGGCATGTAGTGGCTTGATGCAGGATCTCAATTCCCAGACCA
GGGACTGAACCTGGGCCACAGTGGGGAAAGCACCAAATCCTAACTACTACACCACCAGGGAACTCCCTGCAGCTTGA
TGTTTTGATATATGTAGACACTGTGAAAAGATCACCACACGCAAGCTAATTAATGAATTCATCACCTCTACACAGTG
TGGGTATCTTCACAAATTTCAAGAACGCAATGCAGTATTATTAACTATTCATCACCTTTTTTCCCCCTTTTCCATGT
GTAAATTAACTTTTGATATTTGTGGGGTTTTTTGTTCTGTTTTGTTTTGTCTTTTTAGGGCTGCACCTGCAGCATAT
GAAAGTTCCCAGGTTAGCAGTCCAATTGGAGCTGCAGCTGCCAGTCTACGCCACAGTCACTGCCACAGCCACAGAAA
TGCCAGATCTGAGCCACGTCTGGGACACACACCACAGCTTATGCAACACCAGACCCTTAACCCACTGAGCAAGGCCA
CGGATTGAGCCCACATCCTCATGGACACTAGTCGGGTTCATTACTGCTAAGCCACGACGGGAACTCCTGTGTTAATT
TTTTATTGTCATTAAGGCCACGTGTGCTTTTATAGCTTTGTGCCATTTTCATTTTTGTGATGGTGTGTGACAAAACC
AGAGCAGCACTCACATTCCTCTCCAACTCTCACCAGTCCAGAGAGGAAGTTGGAAGTGATGCATACAAAGAAAACCA
CAGCTTTCAAAAGATACACGCACCCCAACGTTCACGGCAGCACTATTCACAATAGCCAAGACGTGGAAACAACCTAA
ATGTCCATCAACAGATGAGTGGTGTACACACACACACACACACACACACACACACAATGGAATATTACTCCCTCATG
AAAAGAGTGCAATAATGCCATTTGCAGCAACGCAGATGGACCTAGAGATTATCATACTGAATGAATTCAGAGAAAGA
CGGATATCATATGATATCCCACATATGTGGATTCAAAAGAGATACAAATGAACTTATTTACCAAAGAGAAACAGACT
CATAGATTTAGAAAACAACCTTATGGCTACCAAAGGGGAAAGGTGGCTGGCGTGGGGAGGGGGTGGAGGGATAAATT
AGGAAATTGGGATTAATATATACATACTACCATATATAAAATAGATAGGAGTTCCCATTGTGGCTCAGTGAGTTATG
AACCCAACTGTGATCCATGAGGATGCAGGTTCAATCCCTGGCTTTGCTCAGTGGGTTAAGGATCCGGTGTTGCTGTG
ACCTGTGGTGTAGGTCACAGATGCAGCTCAGGTCTGATGCTGCTGTGGCTGTGGTGTAGGCCAGCAGCTACAGCTCC
GATTTGACCCCTAACCTGGGAACCTCCATATGCCTCGGATGCAGCCCCAAAGACCAAAAAAAAAAAAAAAAAAAGAT
AACTGACAAGGACCTACTGTATGGCAAAGGGAAGTACACGCAATTATTCTGTAATTTCCTACGTGAGGGAAGGAATC
TGTAAAAGAATGGGTATAGCTGAATCACTTTGCTGTACACTTGAAACTGATACACCATGGTAAATCAACTCTACTCC
AATAGAAAATACAAATTAGGGTTTTATAAATTTTATAAAAATAAAATAAAACCTAGGCCACCTGGTGGCCTAGAGGT
TAAGGATCCAACATTCTCACTGCTGTGGCACAGGCGGGATCAGGCTGGATCCCTGGCCTGGGAACTTCTGCATGACA
TAGGTGTGGCCAAGCAAAAAAAAAAAATTCAATTAAAAAAAATGACTGGGAGTTCCCATTGTGGCTCAGTGATTAAG
AAACCCAACTAGTAACCATGAGGTTGCAGGTTTGATCCCTGGCCTCACTCAGTGGGTTAAGGATCTGGCCGGCATTG
CTGTAAAGTGTGGTGTAGGCCAGCAGTTACAGTTCCAACTGGACCTCTAGCCTGGGAACCTCCAGATGGGGCAAGTG
TGGCACTAAAGACAGAAGACAAAAAAAAAAAAAAGATTGAAAAAAGTGCCTAAACACACTTTTTTCTTTTGCCATTT
CTTGAGCTGCTCCCTCAGCATATGGAGGTTCCCAGGCTAGGGGTCCAGTCGGAGCTATAGCCGCTGGCCTATGCCAG
AGCCACAACAACGGGCAATTCAGCCGCATCTGCAAACTACACCACAGCTCACAGCAATGCCGGATCCTGAACCCACT
GAGCAAGGCCAGGGATCGAACCCACAACCTCATGGTTCCTACTCGGATTCGTTAACCACTGAGCCACGACGGGAACT
CCACAACACACTTTAAGGACAGAACAACGGTGAGTCTGGGGAGTGGGGTTGGTGTGATTTGTTCAAAGAAAAGTAAG
AATGGAGGCAGAAGCAGAATCCGAGGGTCTCATTTCCGTGCGAGAGTCTCAATCCCAGAGCTGCTCTGCATCACCTC
CTGCACGGCCCTTCCCCTTCCGCCTCCCTCTTCCCCCCCCCCCCACCCCCGTCCCTTTTCCTCTCCTCTTTCCTCCT
GTCCTTTCCTCTCTGCCCTCTCCTCCCCCTCCCCCTCTGGCTCGTCAGATGGCAATGGGGTAGAACTGGCAGCGCTC
AGCTCACTTACCACGTCCAGTTCCGTTTTCTCTAGGACGTCCACCAGCGCCTCGATCCTGGTCTTGCTGTTGAAGAT
GAAGTCATCGTCCACCCAGAGCACATATTTGGTGGTGACCTGAGATATGGCCAGGTTCCTGCCAGCAAACCAGCCCT
GCGAGGGCAGGGAGGTTAGACCCGTGGTTGCCCGCCCCGCTGCCTCCTAGCATCACCTGGGGGCTTTCTCAGCTCCC
AAGGGTCAGGCTGCCCCCCAGACAGTGGCTGAGAACCTCTGGGCTAAAGGGAGTCCATGTCTCAGAGACCCTGGAAG
AAGGAGAGGGACTCTCTGGAGACGAGAAAGTCCCTCCTTGGCCCTGTGGCTTGAGGGATGGATGCAAGTCCCTTTAC
ACCTGACAGTCTTTGTGGCCCTTTCGCCCTGTGTTGCCTGGAAGATGCTGGAGGGTGGGGCTCTCTGGAAGGGGTAA
CATCCACTTCCTCCCGGTGTGCTCGAGGGAAGGTGTGGGGCGCGGAGAGAGACACCCCAGCAAGGGTGAAATCATGA
CAGAGGTTTCTCTGCTGTGGGACCTGCGTATCAGGAAACCTTAGAGCGTCAGACACCGCCAGTCGCTTACAAGGACC
TCCATCAATTTCCACACCAAGCGTGAGGAAAGACAGATTACCCACCCCGTCACTGCAGGAAAGGGAGAGTGACCTGA
TTTCTCCGGGAATTTGGAGGCAGCCAGGGGACTCAGAGGAGTCCCCACCCCCCGCCCCCCAAGGATCCTGCTGCCGT
GGGAGGGTCCCCCCCAACCCCGAAGCAGCCCCAACCAGGGTACCACTTGACCCTGGGGCCCTCTGGTCCCAAGGTGC
CCGTGTCTCCCCCTCTGGGAGGAATATACCTTCCCAAATGGCATGGTGTAATACTCCACGTGGCTGTCAGTGATTTT
CAGGGGCTCCTTGCTGTCATCGGCCACGATCACCGTCAGGTCTGGGTAGTACTCACGAACACTCCGGAGCATGGTCA
TGAGCTTGTGGGGACGGAGGAAGGTTTTGGTGGCAATGGTCACCAGGTCTCGGAGCTTCCTCTCTGGGCAAGAAAGG
GTAGGTGTCAGAGCTCTGTCTTCAAGAATCCTCACTGACGTGCATTGCTCTGGAGGTTTCTTTACACGGCGCTGTCT
CGAGTGTTTGTGGACCTCATGCCTTTTGTTCACAGTTGATGTTAGTTGGATCAGAAAATACATTTTATTATTATTAT
TTTGTCTTTTTGTCTTTTTAGGGCCGCACCTGCAGCATATGGAGGGTCCCAGGCTAGGGGTCAGCTCAGAGCTACAG
CTGCCGGCCTACACCACAGCCACACCAACACAGGATCCGAGCCTCATCTACACCACAGCTCACGGCAATGCCGGATC
CCTAACCCACTGAGCGAGGCCAGGGATCAAACCTGCATCCTCATGGATGCTAGTTAGATTCGTTTCCGCTGAGCCAT
GGTGGGAACTCCATGAGTCAGATTCTCAACCCACTGAGCCACAACGCGAACTCCCAATTTGTTTAAATGGTTTCTGT
CTTCTAGAGTGTCTCCCTTTTTTTTTGGTTTTTTTTTTGTTTTTTGCTTGTTTGTTTGTTCTTTTCTTAGTAGCTGC
ACCTGCAGCATATGTAGGTTCCCAGGCTCCCAGGCTCCCAGTTGAATCAGAGCCGCAGCTGCAGGCCTATACCTCAG
CCACATCAGATCTGAGCCGCATCTTTGACCCACATCACAGCTGGCAGCTATGCAGATACTGAACCCACTAAGTGAGG
CCAGGGGTTGAACCTGCATCCTCACAGACACCATGTCAGGTTCTTCACCCACTGAGCCACAACGGGAACTCCTCTCT
TCTGGTTCTGTTGGCTCCAGTCTGCTGTTTCCTTCTGTCGAGTGGGATGCTTCAAGTTCTGCCTGCCTATCTGCACT
TGGTTTGCAACCGGCTTTCATGCTGTTACTGGGAATTGAGACGCATAGAGTTTCACCCATCAAGGGATTCAATATGA
CCAGTCGTGAGGCCCAGGAAGAGGGGAAAAGATTTAAAGACCTGAGACCTGCCCTGTCACAGCTGCAATCCTACAGA
GAGACGTGCCTGGCCTGGTTTGTTTTTTTTTTTTTGCTTTTTTTAGGGCCGCACCCACGGCATATGGAGGTTCCCAG
GCTAGGGGTCGCATTGTAGCTACAGCTGCTGGCCACAGCCACAGCCACAGCCACAGCGATGCCAGATCCGAGCCGAG
TCTGCAGCCTATACCACAGCTCATAGCAACGCCGGATCCTCAACCCACTGAGCAAAGCCAGGAATCGAACCTGAAAC
CTCATGGACACTGGTAGGGTTCGTTAACCCCTAAGCCACGACGGGAACTCCTTGTGGTTCTTATCCATGTTCTTTTC
TTACTGATTCATAAGTCCTCTGAAGTAAAATTAGACCTTTGACTTTCGTGTGTGTGGTTATTTTTCCCCAGTTTGTC
TTTTGTCATTTGACTTTGCATATGGTAGGCTTCCGTCATTAAAAACATTAAAAATTGTTATATAATTTATGTTTTTA
GTCTTTTTCCTTTTAGTCTTTTTCCTAGGTTTTGTGTCTTATTTAGAAAAGTCATACTTTACACAGTTATTTTTAAA
CTCCAGGCTGATTCCTAGTACTTAAAACAATTAGATATTTGCTCTACCTGGACTGTACCTTGGTGTGAGCTATGAGA
TGGATTCAGCTTGTTATTTTCACACAGCTACACAGTTATCTAACACAATCTCTTGAACAATCCATCTTTTTCCCCTT
TAATTTGAAAAACTACCTTGATCACACGGTAAAATTCCAAGATGTCTATTTCTGGGTTTCTTTTCTTTTCTTTTTCT
TTTTTTTTTTTTGTCTTTTCTAGGGCTACACCCGCGGCACATGGAGGTTCCCAGGCTAGGGGTCGAATTGGAGCTGC
AGCTGCCAGCCTATGCCAGAGCCATAGCAACATGGGATCCAAGCCGCGTCTGTGACCTACACCACAGCTCATGGCAA
TGCCGGATCCTTAACCCACTGAGCAAGGCCAGGGACCGAACCCGCAACCTCATGGTTCCTAGTCGGATTAGTTCGTT
AACCACTGCGCCATGACAAGAATGCCTAGGTATCTAATTTGATTCCACTGACATAGCTCTTCGTGGTCCAATACCAT
TCTATTTTTATAATTATTACTTATTAAAATGTCATAAATCATTAGATTTTTTTCAAAATAAATTCAACCGTACAATA
AGTTAAACGTAATGAAGCAGTATTAAAAGCGTATTCTAGCATTTTTTTCCTCCAAAAAAGCTTGTTGGAGTTCTCTG
GTGGCCTAGTGGACTAAGGATCCAGTGTTGTCACTGCTGTGGCTTGGGTCACTGCTGTGGCACAGGTTCCATCCAAG
GCCTGGAAACTTCCACTCTGCGGGCACAACCAAAAAAAAAAAAAAAGCTTGTTAACAGGACTCCTATTGGAGTTTTT
ATTTCATCGAGTCTCCTCCTCCATCTCAGAGGGGAGCCCTTCTGCATCTCACCCAATAGTCTCCAGGGACCCACCAT
GGAGCCCCAGGGACAAGGGTCTTACCTGGTCCAGGGTCATATAACTTGGGCATGACAGGATAGCGGATGGTCACTGG
AAACTTGGCCACTGAGGACTTGGACTCCAGACTCACTGGAGGGAGAAATCAGGTCAGGGCTGGTGCACGGTATCTGG
GTCACTCCCCACAAGGCCGGGGAAGCCCACGCGATGGGGGAGTGAAGGACTGAGGACCCCACAGAGTCTATGGCATT
CTGGCTCCTACCCTGCTGTGTGTTCCGGAAGCAACCTGCTGACCGCCTCTGAAACGCACATGTCTGCCCCCGTGAGA
CTCTGTCGGGTGAAGTGGGCTTGGAATCAGAGGGGTAGATTAAGTTTGACTCTGCATCTATAATTTGAAATACCTTG
GGTAAGTCACATCACCTCCACCTCCACCTCCAAAACCAGGGTAACACTACCAGCCCAGTTCACCTCACAGTGCCTTT
TTTGTTTTTTTTTTTTTTGAAGGGCTGCAGGTGCAGCATATGGAGGTTCCCAGGCTAGGGGTCAAATCAGAGCTGTA
GCTGCCGGCCTACACCACAGCCACAGCCACAGCCACATGGGATCCGAGCCACGTCTACAACCTACACCAGTGCCTGG
CAACACCAGATACTTAACTCACGAGTGAGGCCAGGGATTGAACCTGCATCGTCATGGATCCCAGTCAGGCTCGTTTC
TGCTGAGCCACAATGGGAAGCCCCTTCATAGGGTCATTCTGTGGTAAGACATGTTTAAAAATCCCAAGGTACAGAGA
ACTCTCTCTCTAGCTTATGCTCATGGAAAATCTGCCTCACATTCACTGGGGTCCTGGGAAAGCCTCCTGTGTATCTG
GTCAAAGCAGAAAAAGGTAAATGTCTTTTTTTTTTTTTTTTTTTTCTTTTTACGGCTGCACCTGCTGCATATGGAAG
TTCCCGGACTAGGGCTCAAATTGGAGCTGCAGCTGCCGGCCTACGCCACAGCCACAGCCACAGCCAATGGAATCCCA
GCCACATCTGCGAATTATGCCGCAGCGAGGCCTGGGAGCAAACCTGCATCCTCATGGATTCTAGTTAGGTTCTTAAT
CCACTGAGCCACAAGAACTCCGGAAAAGGGTAATTTATTTATGTATGTATTTATTTATTTTTGTCTTTTTCTTTTTA
GGGCTGCACCCGTGGCATATGGAGGTTCCCAGGCTAGGAGTCCAGCTGGAGCTATAGCCACCAGACTACACCACAGC
CACAGCAGCTCAGAATCTGAGCCACTTCTGCAGCCTACACCACGGCTCACGCAATGCCGGACCCTTAACGCCCTGAG
CAAGGCCATGGATCAAACCCGTGTCCTCATGGATACTAGTTGGGTTCGTTAACCACTGAGCCACAATGGGAACTCCC
GGAAAAGGGTTTTAATTCATCCAGAAAGTAAGTGGGGCTGCCCTGAGGGTGGCAGGAATTGGTCTCCCATGAATTCT
GGGAGTAAGAGTCGGGTTTGGGATGGGAGGGGAGGAGGAAGACAAAGCCACTGCCCTTGGGACTGACAGCTCCCCCA
CATCCCTCTTTCCCGTAATGCTCAGGACAAGCCACTGACACGTGGACTGTGTTCTCCTCTACTGCAGCTGAAACCTT
CAGCTTTTTCTTTTTCTTTTCTTTCCTTTGCTTTTTAGGGCCGCACCCGCAGCATATGGAAGTTCCCAGGCTAGGAA
TCGAATAGGAGCCGCAGCTGCCAGCCTACACCACAGCCACAGCAACGCAGGATGGGATCTGAGCCACGTCTGCGACC
TACACCACAGCTCACGGCAACGCCGGATCCCCGACCCACCGGTGAGGCCAGGGATCGAACCGCCAACCTCGTGAATA
CTGGTCAGATTCATTTCCACTGCACCACAACCGGAACAGGGAACCTTCAGCTTTGATCACTGATGAGAACGGGAGCA
GAAGGGGATGGTTTCCAGGTGCAGAGCATGAATGATCTGTCCTCATGTACAGACAAGCAGGCATTTCACTGTCTTTC
TTTCGGGTCCCTCCACGGGCTCAATGGCAACACGGGGATAGTACCAGGTACACTAAGTGGGAAATTAGAAACAGGAG
CCAGGGAAGCAGGCTTCCTGGAGAAGGAAGACCTTGAGAGCCGGGGGCGGGGGCAGTGGTGGTGTTTATGGGGTCCC
TCAGCATTTTGCCATCCGAGGACGGACTCACCCACATCCACTCTGTGGAGGTGGTACTCTGTGCTCGTGTATGTCAC
ATGCTGGAGGATGAAATTCAAAAGCTCCCGGCTACTGGTCAAAATGTTCAGCTGCTTCTGGCCTCTGCCCTTCACCA
CATTGTCTGGGACGTCAGCAAGGGTGTTCAGTGTCCCCAGAGAAGCTGTCAGGGTGACCTAGGATAAAGGAGGTAGA
AAGCCTAAATGCAGAGAGGCACATACCCAGGATGGCCAGCAGGGGGCAGCATGCATAAGGGTGTGAGGAGAAGAACG
CTTCATGCTCCCGAAAGCTAGGGTCTGGCCTCTGATGGAGTGTCTGCCCCAGCCCCAAAAGCCTAGGACCTAGGACC
TGGTGTGTTCAAGGGCCATTTCTGAAACATTCTTAACTCTTGGCATGCAGAGTTAAGTGGCATCCATTCTTAAAGAT
TTCTTCTGGAGTTCCTGTTGTGGCTCAGTGATAACGAATCCGACTAGGAACCATGAGGTTGCAGGTTCGATCCCTGG
CCTTGCTCAGTGGATTAAGGACCCAGTGTTGCTTCGAGCTGTGGTGTAGGTTGTAGATGCGGCTTGGATCCGGTGTG
GCTGTGGCTCTGGCGTAGGCTGGCAGCTACAGCTCTGATTGGACCCCTAGCCTGGGAAACTCCATGTGCCGCTGGAT
GCGGCCCTAAAAAGACAAAAGACAAAAAAAAAGAAAGAAAGAAAGAAAGAAAAAGAAAACTGCTGAAAACATTTCAG
TCAACAGATCTTTTCTTTTCTTTTCTTTCTTTTTAGGGCCAGACCTGAAGCACATGGAAGTTCCCAGGCTAGGGGTC
CAATCAGAGCTACAGCATCTTTGTCTGCCCCATCTTTGTCTCTCTGTCAAACGCTGAGACCAGCCACCATCTCAGGG
AAAAGCGCATGGGCAGTGAGCCAAGGACAGGATGCTAAGTGCAAAGTGGGGCTGGGAAGGGGACTCTTGCCTCATAG
ATGGGAGCATCAGGTCCTTCAAACCGGAGGCCTGGAGGTCACAGGAAAAAGGAGAAAGGAAAAAAAAAAAAAAAAAC
ATTTGAGAGGATGCCAAGAGTTCCCTGATGCTCTCAGCTCCCTGGCCAATTCCTACACATCCCTCCAGAGCCCCTTC
AAGTGTCACCTATCCAGGGTGTTTGCAGACCGCTCGCCTCCCCACTAGAGCTTGCTAGATGGTGTCCAACGGACCTC
TGCAAACTCCAGCAAACCAAAGCCTCTGATGCCCTCCCCTAGTTTGGGTTTTTTTTTTTTTTTTTTTTGTCTTGTTG
TTGTTGGGTTTTGGGGGGGGGTTGGGGGCTTTTTAGGGCCACACCCTCTGCATAAGGAAGTTCCCAGGCCACGGGTT
GAATCAGAGCTGCAGCTGCTGGCCTACGTCACAATGACAGCAATACAGATTGTCAGCTGAGTCTGCGACCTACACCA
CAGCTCACAGCAACACCGGATCCCTGCCCCACTGAGCGAGGCCAGGGATACAACCCAAAACCTCATGGTGCCTAGTT
GGATTTGTTTCCACTGCACCACCACAGGAACCCCTAAATGGTAAACTTTATGTTACATATATTTTACACACTAGAAA
GAGAATTATCCAAAATGGCAAATCATTTTTTAAATGAGTACTTAAAAACACGAGCAACTCAGAGTTCCTGTCATGGC
GCAGTGGAAACGAATCCAACTAAGAACCATGAGGTTGTGGGTTCGATCCCTGGCCTCACTCAATGGGTAAAGGATCC
AGCATTGCTGTGCGCTGTGGTGTAGGTCGCAGACGCAGCTCGGATCTGGTGTTGCTGGGGCTCTGCTGTAGGCCAGC
AGCTACAACTCCGATTTGACCCCTAGCCTGGGAACCTCCAGGTGCTAAAAAGACAAACGACAAAAACAAAAAACAAA
AAACAGAACAAAACAAAAAAAACCCAAAACACCAGCAACTCATCTCAAATGTTTTTACTTTAAAATCTATCTCTGTT
CTTATGACTAATGCAAATTCTCACTCAAACACATCCTCCTTCTGTGGCCTAAACTTATTTGGGAAATTGGCAAAATA
ACATTTACCTCACAGGGATGTATGCTGGACGAGAGGTGTGTGTAAAAACCACTCGTGGAGGAGCTGTAACGGATAGA
AATATTCTTTCCATATGCAGTCCCTGGAGATGGGCTGAGGCTTTGCTTGCTCCCTTGATGCTGGCAGACACCAAAAA
GCCAATAATGGCCTAAGATTCCTCGAGGCACCCAGATCTCCGTCCTCTCCTATACGATCCAAGATGCCCAGGGAGGC
AACAGCTCCTAAGTGCCATTCCCAGTGGTGGAAACAGTGAGAATAACATCAAATGAAACCATGTCCAGCTTCATGGA
TTGTGCTGGGTATCCGGGAAGGATTCAGCGGATAACTGCTCCCTTCTGCTCCCTTCTTTGCTTCAGAAGGACTACGA
GAGCTGCCTGGGTCCTGTCCGGGTGGAGATGCACCTACCTGGGATGGGGATGGTGTGTAGAGGCATCACTTCCACCC
CGTGGACCGGGTACCCAAAGGGGAGGTTGGGCTGAGCCAGCAGGGGCGGTGGGCGAGGGAGCCCTTCTCTGCAGGGA
AACAAAACCATCAGCAGCTGCCTTGATACCTGTCCCTGACTAGCTCTTTTTTGGGGGGGAGGGGGGTGCAACCACAC
CCACGGCATAGACGTTCCCAGGCCAGGGATCTCACCCACCCCACGGCAGCGACCTGAGCCAATGCAGTGACCATGCC
AGATCCTCCTTAACGTGCTGAGCCACAAGGGAACTTCCACTGCTCCCACTGGTTTGTTCTTTTTTTTTTCTTTCGTT
TTTGGCCTTCCCAGGCCAGGGATCAGACCTGAGCTGTGGCTGCGACCTAAGCTGCAGCTGCAGCAAAAGATCTTTAA
CCCACTGTGCTAGGCCAGGGGTTGAACCTGCATCCCCGTGCTCCCCAGACACAGCTGATTCCACTGTACCACAGCAG
GAGCTCCTCACTGTCGCCACTGGCTAGTTCTTTTTCTTTTTTTCTTTCTTTTTTTTTGCTTTTTTAGAGCCACTTCC
CGCGGCATATGGAGGTTCCCAGGCTAGGGGTCCAATCAGAGCTGTAGCTGCCGGCCTACGCCACAGCCACAGCAACG
CGGGATTTGAGCCGCGTCTGCGACCCACACCACGGCTCACAGCAATGCTGGATCCTGAACCCACTGAGCAAGGCCAG
GGATCGAACCCACATCCTCATGGATACTAGTCAGGTTTGTTAACCACTGAGCCACGACAGGAACTGCTGGCTAGCTC
TTAAAGGGGTATCTGTGCCCAGAGCTTTGGGCTGCAAAGGGGGAGAAATCCAAAGTAAATCGTCGGATTGTCATGCA
TTCTCTCCTCTTCTTTATTCCTGCTCCTCCCTCCAGCCTCGAATTCCACAAAGAAACTGAGGCAGATTACAACAACA
CACATTAAAAATAAAAATCACGGAGTTCCTTTTGTGGCTCAGCCGGTTAAGAATCCAATGCAGCATTCTTGAAGTTG
CGGGTTCAATCCCTGGCCTCGCTCAGAGGGTTAAGGATCCAGCGTTGCCCTGAGCTGTGGTGTAGGTCGCAGACGCG
GCTCGGATCCCACATGGCTGTGGCTGTGGCTGTGGGGTAGGCTGGCTTCTGTAGCTCCGATTGGACCCCTAGCCTGG
GAACCTCCATGTGCCTCGGGTGTGGCCCTAAAAAGTAAATAAATAAATAAAATGAAACATAACATAAAGAGAACAAA
GGTAACACCTGCTCACACTCACCACGTTCGAATTATTTTAATACATTTTCAATTGCTGGTTTTCAATGTGAGCCATT
TTAAATAAATCTTTACATGCAATATTAAAAAATATTAAAATATTATCTCTACTCTTGAGGTTATTTGCATCAATCTC
CCTGTGGATGGAGATATTATATAACCGGCATGCAATGATATCTCGTGGGAGACTTGAAATCAGCCACAGTGTGATTT
CTTGTAGGGTTGAGTTTTTTTTTAATTTTTGAACTTTTTACTAAAGCAGGGTTGATTTACAATGTTGTGTACAGTGT
GATTATTAAACCGTGGAAATTGGCAAACACTACAAGCCACTACCAAAAGCCCATGGTTAAATATTACCACCACTATT
CATATTTCTCCCTCAACGTATAAACACATCTACCCACACTTATACACACAACTATCCCCTCCTCTTTTAAAAACACA
AATGTGGAGTTCCCATTGTGGCAGAGTGGAAATGAATCTGACTAGGATCCATGAGGATGCAGATTCGATCCCTGGCC
TCACTCAGTGGGGTAAGGATCCAGCGTTACCGTGAGCTGTGGCGTAGGTCGCAGACGCGGCTCAGATCTGGCATTGC
TGTGGCTCTGGCGTAGGCAAGAGTCTACAGCTCCAATCAGACTCCTAGCCTGGGAACCTCCATGTGCCATGGGAAGT
GGCCCTAGAAAAGGCAAAATACCAAAAAAAAAAAAAAAAAAAAAAAAAAAAGAGGGCATTCCCTCCCCCCTCCTTGG
AGCCACACCCTCGGGAATGAGTAGAGAGCTTCCGCTCCATCTCAGGGCGCAAGAGCCCTCAGCATCTGCAATACCTC
CTCTGAAAGTGTTCGAGCTCAGCCTGTCTCCTCAGGTTCACTGCGGGGAGGTCTTGCGGGTCGTAGGCATCCTCCAA
GTTATAGCTTTCCTGATGCCCGAAGGCGTCACATTGGCACTGGTTTTTCGGGAACAGCCTAAAATAAGACAAGGTCA
AAGATCACAGATTGGGAAAGTGGGCTGGTAGGTGAGGGGGAGCCGCAAGCTCGGTCCGGTGTATTTTTTTTTTTTTT
TTAACTTTTTATTTTCTCTTTTTTTGTCTTTTTAGGGCCGCAAGGTTCCGAGGCTGGGGTCTCATCGGAGCCGTAGC
CACCGGCCTACGCCAGAGCCACAGCAACGCAGGATCCGAGCCGCATCTGCGACCTACACCACAGCTCATAGCAATGC
TTGATCCTTAACCCACTGGGCAAGGTCAGGGATCGAACCCTCAACCTCATGGTTCCTATTCGGATTCATCTCCGCGG
AGCCATGATGGGAACTCCCAATCCAGTGTGTTTTTCCCCCTAGGCTTTCCCATACCTAGCGCCAGGGTTGGGTTGAG
ACCCTGGAATCACAGCAGCGGCCGCTCCCAAAGACACAGGGAAGGAAGGGAAGAGAGGAAGGAAGGAGGGCGAGAAG
GCCCCCTCTCTGGAATCAAAGTCCTTTATTTATTATTATTATTATTATTTGCTTTGTAGGGCTGCACCCGCAGCATA
TGCAGGTTCCCAGGCTAGGGGTCCAATCGGAGCTACAGCTGCCAACCTACACCACAGCCACAGCAAGATCAGATCCA
AGCGGCGTCTGGGACCTACACCACAGTTCACGGCAACCCCGATCCTTAACCCATGGAGCGAGGCCAGGGATCAAACC
CACAACCTCATGCTTCCTAGCCAGATTCGTTTCTGCAGCGACATGACAGGAACTCCCCAAACTCCTTTAAACTTGAG
AGTCACAGGAATCTCAGAGGCATTGCAGCCCCACCCACCAGATGAAAAGGCCAGAGGGCCAGAAAGGCCACATCTTT
CCTATAATTTTGTTTAGTTTTGGGGGTTTTAATGTGTTTTTGTTTTTTAGGGCCACATCTGCAGCATATGGAAGTTC
TCAGGCTAGCGGTGGAATCGGAGCTACAGCTGCCGGCCTACACCACAGCCACAGAAACATGGGATCTGAGCTGCGTC
TTCAATCTACACCACAGCTCACCGCAACCCTGGATCCCCGACTCACTGAGCGAAGCCAAGGATCAAATCTGCGCATC
CTCATGGATCCTAGTTGGGTTTGTCACCACTGAGCCACAACGGGAACTCCTCCTACAGTTTTGGTTAAATAGGCCCT
CCAAAGTCCTAAAGAACTTTGCTGGGTGCTATAGAGGCTATGCCCAGCAGACCAAGCCCCTTTCTAGTCCCGCCGTT
TGCAGTCAAATGCTCTACCCCTGAGCCATACTCCCACCAGGTCCCGCAGTCAGGATTCACATTCCCAATCAGCACAG
GTGCAGAAAGGTAGGGAACTGGCTGTAAAGTGGGCATAAGAGGACACAGTAGGAGTTCCCGTCGTGGCGCAGTGGTT
AACCAATCCGACTAGGAACCATGAGGTTGAGGGTTCGATCCCTGGCCTTGCTCAGTGGGTTAAGGAGCCAGTGTTGC
TGCGAGCTGTGGTGTAGGTTGCAGATGTGGCTCGGATCCTGCGTTGCTGTGGCTCTGGCGTAGGCCGGTGGCTACAG
CTCCGATGGGACCCCTAGCCTGGGAACCTCCATATGCTGCGAGAAGGGCCCAAGAAATAGCAAAAAGACAAAAAAAA
AAAAAAAAAAAGAAAAAAGGGCACAGTAAAGCCACAGGAGGAGCCAGGGAAGTGTCAGTGCAAAGTGGTATTCTTGC
CATCTCACCCGTTTTCACCGTAGAAATCGGGTTTCTCAGGTAGAAGCTTCAGCGTCTGCGCATCCAGGGTGGGGGAC
GGGATGGGTGAGTTGAGGAGACTGAAGTCTGTATCGAGGAACACGCTTTGGAACATAAAGAGTCCAACGCTCAGGAC
CAAAAGCACCATCAATATCTTGAGGATCGACAGACATCTAGGGCTGTTGGGACACAAGAGAGCAAACGCTGTTAAAA
TCTTTTCTGAGTATGTTAAAAAAGATTTCATTGTGCGACATAGATGGGAATAGCAACTTGAGCAAAAATGCAAGTCA
AACCTGTTTTGTACACTACGTATCAAAATTGATTTCTTCCCAAGGCAAAAGAGAAAGAAAAGCAAAAATAAACCTAA
GCAAACTGACAAGCTTTTGCACAGCAAAGGAAACCATAAAATAACCCAAAAAGATCCTGCTGGGATCCACTGGGAAC
GATGTCTGGTCACTTGCGATGGAGCATGATCATGTGAGAAAAAAGAATGTATACATGTGTGTGTGACTGGGTCACCT
TGCTGTGCAGTAGAAAATTGACAGAACACTGCAAACCAGCTATAATGGGAATGATAAAAATCATTTAAAAAACTGAT
TTCAGATAAATAGAAAAGTAAAGAATCAAATCTGCAGAGAGTTCCCTGGTGGCTCATTGGGTTAAGGATCTGGTGTG
GTCACTGCTGTGGCTCTGGTCACCACCGCGGCATGACCTCCATCCCTAGCCCAGGAACTTCTGCATACGTGGGCATG
GCCAAAAAACTATACTCAGTGGAAAATGTGAAGTTTTTCAAATACGCACTTCTGATCACAAGACCTAAAATTAATAA
ATGAAGCAATAAAATAAGAGATTTGAAAATGGACAACAAAATGAACCTACGAAAAGCAGAAACAAGATTTTAGAGAT
AGCCAAATAGAAAGTGGTGAATTTAAAAAAAAAAAAACTAAAATGGAATCATCGTTAAATCTAAGCACAGAGTAGAC
AACTGGTTTTTTCTTTTATTTTTTTAAAATTTTATGGCCACAGCCATGGCCTGTGGAAGTTCCCAGGCCAAGGACTG
AATCCAATCCATAGCTTCAACCTACACCTTTAACCACCGCACTGGGCCCAGGGATCAAACCTGCACCTCTCCAGTGA
CCTGAGCCACTGCAGTCGGATTCTTAACCCACTGTGCCAGGGTGGGAATTCCAGACAACTTTATAACCTCCTTGCTC
TAAGACTTTCCTCCTGACCCAGAAGTGACACCTACAAACGAGTCTGGTTATATCACATGACGCTCCCCTGGTCCTGG
CTGAGTAAGCGGATGTTCACCTCATCCGAATGGGGCTAATCAGCCAGAATTTCCTTCCCAGAAATGGGGAACCAGAG
ATATTGTTCGGCTAATCCTAATCCCCTGAACTGAGAATAGAGGGGAGGAAAGAAGAGAGAGAAGACAGAAGGTGAGA
GAAACAAAAGAAGCCTAGAAGGACTTCCCATTGTGGCTCAGTGGGTTAAGACCATGACCAGTGTCCCTAAGGATGCA
GGTTCAATCCCCACCCTTGCTCTGGCATTGCCACAAACTGGTGGCAGATGCGGCTTGGATCTGGCGTTGCTGTGCCT
GGGGCATAGGCTGGCATCTGTGGATCCAATTCGACCCCTAGCCTGGGAACTTCCATGTGACACAGGTGCGGCCCTAA
AAAAAAATCGTTTTTAATTTAAAATTTTGGGGGCAGTGTCTTTAAGGCATTAGTCTGCTATGGCTCCCTTTGCCTGA
CAAAGCAATAAAGCTATCTTTTTCTCCTTCACCTGCTCCTCCCCCCAAAAAAGAGTTCCCATTGTGCCGCAGCAGAA
ACGAATACAACTAGTAACCATGAGGTTTCACGTTCGATCCCTGGCCTTGCTGGGTGGGTTATGGATCCAGCATTGCC
ATGAGCTGTGGTGTAGGTTGCAGATGTGGCTCGGATCCTGCATTGCTGTGGCTGTGGTGTAGGCCTAGCCTTGGAAC
CTCCGTATACCATGGGTATGGCACTAAAAGCCAAAAAAAAAAAAAAAAAAAAAAAAAAAAAATTTAATTTAATTTTT
AAAATTAAAAAATTTTTAATTTAGTTTTTTTAACTTAAAAAAATTTTTTTAAATAGAGAAGCCTAGATCCTGAATAC
CTAGATGAAAGGGATGACTTTCTACAAAAACGCAAATGAATAATGTATTGGGGAAATAAAATAAACAAATAAACAAA
TAAATAAAAGAATTCCCACTGAAGCACCGCCCCCCCAAAAAAAAACCCACAAAAGACTTAAACAGACCTGTAAAAAT
TTAAAAAAAAAAATCAAGGAGTTCCTTTCATGCCTCAGGGGTTAATGAATTCAACTATGAACCATGAGGTTTCGGGT
TCAATCCCTGGCCTTGCTCAGTGGGTTAGGGATCCAGCGTTGCCGTGAGCTGTGGCTCTGGCGTAGGCTGACAGCTG
TAGCTCCAATTAGACCCCTAGCCTGGGAACATCCATATGCCACTGGTTCGACCCTACAAAAGCCCAAAAAAAAAAAA
AAAAAAAAAAAATCCAGGAATTTATCAAAGGTCTATGTACTTTTCAAAGTCCCAAATCCACACTTCACAAGTAACTC
CAGACTGGTTTGTAAGAAACCAGCTTTGCAGTGATGCAAATATAGGTACTGACCAATAACGATGTAAATACGCCAAA
CAAATATTAACCAGTGGGACACAACAGTATCTTAAATGAATGAGTCACCGTTAACGAATGCTGTTCTTGGAGTTCCC
GTCATGGCTCAGCAGATACGAATCTGACTAGTATCCATGAGGACACAGGCTCCATCCCTGGCCTTGCTCAGTGGGTC
AGGGCTCTGGAATTGCTGTGGCTGTGGTGTAGGTCACAGACGTGGCTCAGATCCCGCATTGCTGTGGCTGTGGTGTA
GGCCGGCAGCTGTAGCTCCGATTCCACCCCTAGCCTGGGAACCTCCATGTGCCGCAGGTGCGGCCCTAAAAAGACAA
AAACAAAAGCATGTTCCTTCTAGGAGAGCAAGGATAACTCAGTGCCACTGTGGGGCAAAACCACACCGACGCCATGC
TGTCAGCTCATCTTAGGCCCACAGTCTCATCTGCTCCCCCTCCTTATTAAAAAAAAAAAAAAAAAAAAAGAATGATC
ACATCCTAAGTTCCTAACACAATTTTCAGACTATCAGATAGAAACAAATCACTGACAACCTGGGTGGGGGGCAGCAT
TTGGGGGAAGTGAGTGTGGTCTTGGCCTTTTTGAGGGTTGGGTTTGTTTCCTTTTGCTATTAGGTACTAAAACTTAA
AATTGCATCACTTAGTGAAAACAGAACAAAAATAGGGTCGGACTTTCTCTGTGGCTCAACAGGTTAAAGACCCAGTG
TTGTCACTGCAGTGGCCCTGGTCGTTGCTGTGCCATGGGTTCCATTCCTGGCCTGAGAACTTCTGTATGCCTCGGGC
GTGGCCAAAAAAAACCCAAACAAAAACAAAAACAGAAACATGAGTTCCTGTCGTGGCGCAGTGGTTAACGAATCCAA
CTAGGAACCATGAGGTTGTAGGTTCGATCCCTAGCCTCGCTCAGTGAGTTAAGGGTCTAGCGTTGCCATGAGCTGTG
GTGTAGGTCACAGACACAGCTCAGATCTGGCCTTGCTGTGGCTCTGCCGTAGGCCAGTGGCCACAGCTCTGTTTCAA
CACCTAACCTGGGAACCTCCATGTGCGGTGCATTCAGCCTTAAAGAGAAAAGAAAAAAACAAACAAACAAACAAAAA
AAAACAATAGTGAGGAAAAGTGGCATCATTTTACCTTTTTGCCTATTTAATGTTTAGCTTAATAGATAAAATGAACC
ATCTGTTAGGACAGGTTGTTTCGCTGAAGAATATGAAGAAAATACAACCCCACACAGGTATGTCACCAGAAAAGGGA
GAAACACTTTAATTGCTTTTTCAATATTGTAGATATTTATCTTTGATACTACACCAAAAATCAAGAAGTTAGTAGCA
GGTTATTGTTTTGTTTTGTTTTGCCTGTGGCATGCATTAGCTCGATGTGGGATTTTTTTTTTTTTTTTTTGGCTTTT
TTTTTGGCCTTTTGCCATTTCTAGGGCTGCTCCCAGGGCATATGGAGGTTCCTAGGCTAGGGGTCCAATTGGAGCTG
TAGCCACCAGCCTATGCCAGAGCCACAGGAAACGGGGGGAGTTGAGCCAGGTCTGCTCACCTTACGCCACAGCTCAC
AGTAATGCTGGATCCTTAATCCATCTGACCCAGGCCAGGGATCGAACCCTCAACCTCATGGCTCCTAGTCAAATTCA
TTAACCTCTGAGCCACGACGGGAACTCCTCAATGTGGGATTTCAGTTCCCAGTCCAGAGACTGAACCTAGGCCACAG
AGGAAAAAAGCGTGAACCTGAACCCTTAGTAGCTAGGGAACTTCCAAGAAGTGGTACTTTCTTAAAAAGTTAGTTAA
GTGTGGACTCTGAAACCATATCAGTGAAAAAAAAATTTTTTTGCTTTTTTTTTTTAGGACCCCACCTGGTGCATATG
GAAGTTCCCAGGCTAGGGGTGGAATGAGAGCTACAGCTGCTGGCCTACACCACAGCCATAGCAACGCCGGATCCTAA
ACCCACCAAGCAAGGGAACAAATAGAGGGAGTTTCCACTGCGCACAATGGGATCGGTGGCATCACTGCAGCGCCAGG
GACACAGGTTTGATCCCTGACAGCATAGGTTGCAACTGTGGCTCAGATCTGATCCCTGGCCCAGGAACTCCATATGC
CACTGGCACGGCCCCTCCACCCTGCCAAAAAGAGTTTGGAGGCGTTCCCTGGTGGTTCAGTGGTTATGGATCTACAC
TCTCACCACTGTGGCCCAGGTTCAATCCCTGGTCTGGGAACTGAGATCCCACATCAAGCCGCTGCACACCTTGCCCA
AAAAACAGGGTTTTTTAACCTTTTTTTTTTTAAACTGTTATTCCCCAATGCGATTTTTTTCCCCTACTGTACAGTAT
GGTGACCCAGTTACACATACATGTACACATTCTGTTTTCTCACATTATCATGCTCCATCATAAGTGACTAGACAGAG
TTTCTTTCCTTTTTTCTTTTTTTCTTTATTTTTTAATTACTTCCCCAATACAATTTGTTAAAAGGGTTTTTTAATCC
TGATAATAAACACATAAAATTTAGTACCTTGGAGTTCCCGTTGAGGCTCAGCAGAAACAAACCTGACTGGTATCCAT
GAGGATGCAGGTTCAATCCCTGGCCTCACTCAGTGGGTTAACGATCCCGCATTTGCCATGAGCTGCGGTGTAGGTCG
CAGATGCAGCTCAAATCTGGCATTGCTGTGGCTGTGGTGTAGGCTGGCAGCTATAGCTCCGATTTGACCCCTAGCCT
GGGAACCTCCATATGCCATAGGTGTGGCCCTCAATAAAACAAAGAAAGAAAGAAAGAAAGAAAGAAGGAAGGAAGGA
AGGAAGGAAAGGAAGGAAGAAGGGAAGGAAAGGAAGGAAAGGAAGAAAGAAAAAATTTATCACCTTAACTACTTCTA
AGTGTACATATACTTTCATAATGTAGATTGTTCATGTCGTTTTAGAACGGATCTCCAGAACTTTTTTCTGCTTTTTT
CTTTGCTTATATTTTTGCATGCAACTATTTTTATCCATTTTTTCTGATTATGAAATTTTTATCTTTTACCCATTGAA
GAAAAAAAAAGTTCCTCTTTACAAAAACAAAACAAAACAAAACAAATATATGTAGGAGAAATGATAGAATTAGAAAA
ATCACCACTTTGCTACCAACAATGTAATAAATGATTCTGGCCAGGATTGTCCATCTTTTTTTTTTTTTTTTCCTCGT
TTTTTTGCAATTTCTTGGGCCACTCCTGCGGCATATGGAGGTTCCAAGGCCAGGGGTCCAATCCGAGCTGTAGCCGC
CAGCCTATGCCAGAGCCACAGCAACGAGGGATCCAAGCCGCGTCTGCAACCTACACCACAGCTCATGGCAACGCCGG
ATCGTTAACCCACTGAGCAAGGCCAGGGATCGAACCTACAACCTCATGGTTCCTAGTTGGATTCGTTAACCACTGAG
CCACAATGGGAACTCCAGGATTGTCCATCTGTTCTAAAACATTTGCCAGGTGCAGGATTTTGTTTTGTTTTGTTCTG
CTTTTTGTGTTTTTCTTCTTCTTTTTCTTTTTTCTTTTTCTTTTTTTTTTTTTCTTTTTTGTCTTTTTAGTGCTGCA
CCCACAGCATATGGAAGTTCCCAGGCTAGGGGTCTAACCACAGCTGCAGCTGCCAGCCTACGCCACAACAGCAACAG
CAACGTTGGATCCAAGCTGTGCCTCCAACCTACACCCCAGCTCACGGCAATGCCAGATCCTTAACCCGCTGAGCGAG
GCCAGGGATCAAGCCTGCATCATCATGGATACTAGTCGGGTTCATTAGCCACTGAGCCACGACAGGAACTCCTGGAG
GCAGGATATTGAATGGTGCCATTCCGGAGAACACTTACTACTTACAAAGAGATAAAAACACATCTTTGCAATGAAAG
GATCATGCATCACTACCTTAACCACATGGTCAAATAAACATCCCTAATAGTGAGGCAGCCTGACCAACTGTCCTCCG
GATATGATGATAGGAAGCACACAGATCATTTAAAGGAGTATTACTGCCAAAATATTTAACCGAAATGTAATCAAGGA
TCAGAGACCTCACTGCCAATTTATAGGAAAAAACAGGGGATAAAAATTTAGTAACACCATCAAGAACAATAGACAAA
TCAGGGACATCAGAATGTTTTCTGCAAGACAACAGGCCTGAACTCTTGACAAAGGAAAAAAAGTGGGAGTTCCCGCT
ATGGCACAGTGGGTTAGGAATCGGACTACAGCAGCTCGGGGCATTGTGGAGGTGCGGGTTTGATCCCTGGCCCGCTA
TAGTGGGTTAAAGGATCTGGCGCTGTCAAAGCTGCGGCCATTAAAAAAAAAAAAAAAAAGAAAAGAAAAAAGAAAAA
GCAATTGAAAAAAATAAAAAGAATGAGAGTGAATGAGTAACATTTCTAGTAAAGGGTTGCCTGTATCTTGTGCAGAA
CATACAGAATACATCTTTCAATGATTTTAGTCAATTTTTTTGCATTTTAAGAAATTTCTTTTTTTTTAATTGTGGTA
TAGTTAATTTACAATGTTGTGTGAATTTCAAGTACACAGCAATGTGATTCAATTACATATATACATATATACACATA
CATATCCTTTGCAGATTCTTTTCTATTATAGGTTGTTACAACATTTTTTTTTTCTTTTTAAGGCTGCATGTGTGGCA
TATGGAAGTTTCCAGACTAGGGGTCGAACTGGAGCTATAGCTGCCCGCCTACACCACGGCCACTGCCACAGCAACAC
GGTTTCCGAGCCATGTCTGCAACCTACACCACAGCTCACAGCACGCTGGATCCTTGACCCACTGGGCGAGGCCAGGG
ATCCAACCTACACCCTCATGGATACTAGTCAGATTCCTTTCTGCTGCACCACACAGGAACTCCCTATTATAAGATAT
TGAGAATAGCTGTCCTGTGGCACAGTGGGTAAAGGATCTGGTGTTGTCACTGTAGTGGCTCAGGTTGCTGCTGTTGC
ACAAGTATGATCCCTGGCCCAGGAACGCTTGGGATGGCATTAATAGGAATTGTTTGGTAGGAGATTTTTAATAAAAT
GTTCAACCGCCCAATTTTTAATAGATAACTACAAATGTTCTCCACTGTTAAAACTGCACTTTATGTACTTAAGTGGG
GATGTTAAAATTATATGGGTCCGCCCGCTATTATAGTTGAACCACATTTGAGACACATTCAAAAAAGGGTAAAAATC
GGGAGTTCCCACTGCAGCTGCGGGTTCAATCCCTGGCCTCACTCAGTGGGTTAAGGTTCCGGCATTGCCATGAGCGG
TGGTGTAGGTCGCAGTCGCGGCTCAAATCTCGTGTTGCTGTGGCTGTGGCATAGGCTGGCAGCTACAGCTCTGATTG
GACCCCTAGCCTGGGAACCTCCATATGCCGCAGGTGTGGCCCTAGAAAAGACACACACACAAAAAAAAGGTTATGTT
GAAGTTCCCGTTGTGGCTCAGCAGTAACAAACCGGACTAGTATCCGTGAGGACACGGGTTTGATCCCTGGCCTTGCT
CAGTGGGTTAAGGACCCAGTGTTGCCACAAGCTGTGGTTGCAGTGCAGGTCACAGACAAAGCTTAGATCTGACATTG
CTGTGGCTGTGACACAGGCCAGCAGCTACAGCTCAAATTCGACCCCTAGCCTAGGAACATCCACCCACAGGGGGCGG
CCCTAAAAAAAAAAATATATATATATATATGTGTGTGTATATATATATATATATATATTTTATATATAAAACATTTT
ATATATATATATAAAATATATATATATAAAAATATATATATATATAACATTTTATATATATATATAAAATGTTAACA
TTGAGTAGGTTTAAGGTTATTATTTTAATAACTTTATAAATAAAAATTTTAGATTTTCTCAGCTTTAATTTTTAATT
AGGTGTGGAGTTCCCACTGTGGAGCAACAGGATCAGCAGCATCTCTGAAGCGCAGGGATGCAGGTTTGATCTCCAGT
CCTGCACAGTGGGTCAAAGATCCAGCATTGCCACAACTGGGGCATAAGTCTCAACTGGGGCTCAGCTCTGATCACTG
GCCCAGGAACTCCATATGCATCGGGGCAGCCAAAAAAGAAGAAAAAAAAAGTGTCTAATATGGTAATAGGAATAGAT
ACAACCCATGTAAACAAAAGTTTTTTGGGGTCTTCAATAATTTCGAAGAGTGTAAGGGGTCCTGAGACCAAAAAGAT
CAAGAACGGCTGGTCTACGTTCTAAGCAACTGCTGTGGTTCTTGTTAAGTTTTAATACTGAAGATGAGTTTTTACAA
GGACAAACAATATAATACAGGGCATGTAGCCAATATTTCGTAATAACTATAAATGGAATATAGCCTTTAAAAAGGCC
AATCATTCTGTGGCACCCTGAAATTTATATGATACATGAACTGTACCTCAATAAAAAAATTTAATAAGATAATAATA
ATATAGGTGAGCTTCAATTAGCACATTCTATTACTTATCTTTAATAAAAATTATATTCTGTGTGCAAGGTAATCTGA
CAAACTCACCAGTACAACTGGTTTCCAACATAGACCTGGCTCAGCTGCAGAGGTTCCTTTCAAGAGTAAACTTGCAG
GGCTTTCCCCGCTGTGGCACAGCAGAAATGAATCAGACTAGCATCCATGAGGATTCAGGGCACAGAAACAGCTCAGA
TTTAGTGTTGCTGTGGCTGTGGCCATGGTGTAGGCCAGCAGCTGCAGCTCCAATTCGACCCCTAGCCTGGGAACTTC
CATATGCTGATGTAGGAGAAAATGTCCCAATAAAATGTAGAAAGGAGAGACCCCGGCCATGACGACTAAGCAAAGTC
TAGCCAACTGCCCCAACCAGTCCTCCCCCATGCATCTGCTTCTGTAAATTTGTTTCCGCATCTACTACCTTGCCTGA
CGTCACTCCAGTCCAACTAGCCAAGCTTGGACCTGGAAGACGTAGCCCATAAAAGCCTTGTGAAACCCTTCTTCCGG
GCTCAGACTCTGGAGAGTGATCTCGTCTGAGCCCGCCGGCGTAATAAACCTGAGTTCTCCAACTCTCCAAGTGCTCG
CTTGGTTTCTCGCCGGGTAAAAGAGCTGCTCCACTATGGCCACAGAGCTACTGGAGCTGGTACGCTACAGCCACGGG
GCTGTCGCCAGAGCTGATACGCTGCAGCGCAGGGCTGCTGGGTATCTGCTGTAACATTTCTGGAGGCCCCAGCGAGA
TTCCAACCTTTCTGGCCCCTTGAGCCACTGGAACAGAGGTAAGGCCGCCCGGGAGCCGGGGAGCCTCAAACCGAACG
AGGCGGCGCACCACCCGACGGTATTCTGGGTCCTCCTTCGTCAGCGGCATTCCTGATTCCCGGGTGACCAAACCCTG
ACCAGACTCAGTGGAGAGATGGACCAACTCACCAGAAAGGTATCCGGACAAGGTAAGGCAGCGGGGCCAACCCCAGT
CAGGTCCTGCCCCAGTGGGCAGAAGAGGGGACTGATCACCCCCTGAGGGAGACTCTCCCGGTCAGAAGCTGTGCCTG
ACTGGAGCAGCAGTCCTAGTGCTCCAGATTGGAAGCAGAGGAACCTCTTGCTTGGGTGGAGCAACTGTCAGGTGTAG
CCAATTGAAAGTTGTGCTTGATCGAGCTACTAGTTAGGGACTCCCAGGGAGTGGGAGGCATTGTGATAACCTCTGAG
TGTGTGTGAGAGTGAATGAGCGGCCTGATTCGCTTGTGCTTCAGGTTCGAGTTTGTGGCTCCACGGTCTTAGTGGCT
ATGGAGTCTGAGTGGGTCCTAACCTGCAGTTCCGTGGTGACCTCATAGGGCTTATGGCTGCAGCAGACTCTGAGGGT
TCTGTTCCCTCCCTGCAAGTCCAATCCAAGTTCGGGGATTATACGAACCAGCCAATTGCTAAGAGGCACCTAAACTC
CCGAGAGGGGGGCAGTCAGGCGGACATCTGAATGGCCACCTTCTGAGAAGGAGGCACCCTCCCTTGTTTTGTCTGCG
ACACTGGCACAGGGCGTCCACATGGGGTGGGACCTAACCCAGAAGCCCACGAGCCAGAGACCCCTGTGCTTCCGCCA
TTTTGGGCCATAAATTCCTCCAAGGAGATGACCTAATTTGATCTTGCCCCTGGGCCTCCAGGAACTCCCGGCCCAGA
TTCTAAACCAGCCATGGGACTGCCTATTTTGTCAGTTCATGGAGGCCCAGGATCTGAGTCAGGGAGACAAGCCTGTC
ATCCCTGGCTCAGTTCAGGGTATAGGGAGGATTGGGTACAAGGTCCCCTGTCCTTTGCCCAAAACATTAGAACTTGT
CTGAGAGTGCCTTCCTGAGACCGGGGGTCCAGATGGATTGGAGATACTTGCAATAAAGCAGGTGCTCTTCCCAGTCA
TAGAGCAAGCTGAGTGGGATCTGTCTTGCTTTCAAGAGTGGTGGAGGCAAAGCTACTGGGGATACCACCCACGAGGC
CAGAAAAGGTCTCATAATATCAGGCCATAGAAAAGATCCACATAAAGACACCATGGGTTCACCCAAGTCTAAACCTG
TGGTTGTAGACTGTGTGATCAAAGATTTCAAAAAGGGATTTTCTGAAGATTATGGTATAAAACTAACCTGATCTTTC
ATCATTTCCTTTGCCATTACCTCAAATAGAGCTGTGGGGGCAAAGGAAACAGACCTCTAGATGTTAAGACCATCCTG
AGTTGTTACCAGGCCTGTGGGGGAAAAGGAGTTCATAGCTAGTATTCATCCAACTTAGGCCAAGTGTTTAGCCTCAG
AGCCTCGGCATAGTCAGTTTTGCTTTTTGCTGTTTACTTTCATCCTGGTTGGAGTAATTGATGGCTGGTTCATCCAA
TTTACCTGTTAACTGTGGTTTAGAAACTTTCCTAATGTTAATACAGGGCATGTCAGAGTGAGCATCTTAGGATTTGA
AAACTCAGGGCAGGGCCTGTATGCCTGGGTTTTCTTCACCTCTGTCCAGAGACAGGCACTGGGCAGGGATGACGGGA
AGAGAGGCTACGCTGGTAAGGAGTGGTTAATTCCAGTCAGCCTGAGGTCGGATGGGACATTTGACCACTAGTGTCTA
GCTGCTCCATATAAGAGAGGGGACACCCTCACATAGCCAAGAAAGGACAATAGGCGCTGGATGCTGTTTTTTGTCTT
TTTCGGATGGGAGCCACATCCTCAAGCCTGCTGCATGACTCAATAGCAACCCCTCTGACATGTGCCTTGAAGAACTG
GAAAAAGTTTGACCCTGAGATTCTGAAAAAGAAACATTTAATTTTCTTTCGAACAAAAGCCTGGCCGTTATATAATC
TGTCAGATGGAGAGTGACAGCCATCTGAAGGCTCACTAGCTTATAATACCATTCTCCAATTAGCCAGAAGTTAGTCA
GCCTTCTCCAATACTGCTCAAGGCTCCTTCTCCCCGCAAGCCAGTGCCAAAGTTATATCTCTCTCTACTCCCTTTAC
AAGAAGTAGCAAACAGAGAATGGAGGCCAAATACAGGTCTATATACCTATTTCACTTCAGGACTTAGGGCAAATAAA
AACAGATTTGGGAAAATTTGCTGATGACCCAGATATATTGAGGTTTTCAGGGTCTCATGCAGTCCTTTGAGTTAGCC
TTCAAGGACGTCATGTTATTACGGAAACAGACATTGACTATAAGTGGAAAATTACATAAAGTCTCCAAAACTGCTCA
AAGCTGGGGAAGATGAATGGAATGATGCTAAAAATGCCAGAGGCAGATTAGAAGAGGAATGATCAAGATTCCCCACA
GGGTGTCAGGCAGTTCCTATGAGCGATCCCAATTGGTCTGCTGATGAGGGAGATAACAACAATTGGCATAGAAATCA
TTTTATTACTTGTATAGTTAAGGGATTAAAAGCCCGTTAAAACTATCGGAGGTTTACTAGGGGAACAAGAGTCCATC
AGCTTTCTTAAAAAGGCTCAGAAAGGCATTGAGAAAACATAAAACAGGGAACCCAGAAACAATGGAGGGCCAAATAA
TTATTTATTTATTTATTTATTGTCTTTTTGCTATTTCTTTGGCCGCTCCCGTGGCATATGGAGGTTCCCAGGCTAGG
GGTCTAATCAGAGCTGTGGCCACCAGCCTACACCAGAGCCACAGCAATGCAGGATCCGAGCCGAGTCTGCAATCTAC
ACCACAGCTCACGGCAATGCCGGATCGTTAACCCACTGAGCAAGGGCAGGGATCGAACCCTCAACCTCATGGTTCCT
AGTCGGATTCGTTAACCACTGCGCCATGACGGGAACTCCCGAATAATTCTTAAGGATAAATTCATAGCTCAATTGGT
GCCAGATATATGGAGAAAGCTCCAAAAATTGGCTTTTGGCCCTGATCAGGACCTGGAGCACCTCCTCAGAGTAGCAA
CTCAAGTATGTTATAATCTGGGCCAGGAAGAATAAAAGGAGAATGAGAGGAGAGACAGAGAAAAGGCTGAGGCTCTA
GTTATGGCACTACAGGGAGTCAACCTGGAAGTTGCCAAGGTGAGAGGACTAGGGCAGAGACCTATGCCTGCAGCCTG
TTTCCTCTGTGGAAAAGAGGGACCCTTTAAATGGGAATGCCCCAAGCCTCAGACCACAGCACCTAGGCCATGCCCCA
TATGTTGGGGAGATCACTGGAAGAGGGACTGCCCCTGAAGATGAAGGTCTCTGGGGTTGACCCCTCAGGCCCAGGAT
CAAGGCTGACAGGACATTTCCATAATGGCTCCTGTCCTTCTCACCACTCAGGAGTCCTGGGTGACTCTAAATGTAGG
AAGACAGCCTATTGACTTCCTCCTGAATACGGGAGCCACTTTTCAGTCCTCCTCTCCAATCCTGGGCCCCTCCCTCA
TGAATCTGCCACATTTATATTTCCGGCAAGCCGGTTACAAAATTTCTTACACAGCCTTTGAGTTGTGGCTGGGAATC
CATTTTCTTCTCTCATGCCTTTCTGATTGTTCCAGAGAGTCCAACTCCTCTTTTAGAAAGAGATATTTTGTAAGAGG
TTAAAGCCTCAATTCACATGGCAATGGAGCCTAATCAAGGTTTATGCCTGCCTTGGATGGAAGTATATACTGACCCA
GAAGTCTGGGCCATAGGAGGAAACATAGGAAGAGAAAAGAATACTCAACTGGTGGAAATAGGTCTTAAAGACTGGAA
TTTATTTCTTTGCCAAAAGCAGTATCCTCTGAGACCCAAGGCATGACAGGGACTTGTATCAATTATAGGAAGCGTAA
GAGAACAGATTATTAATTGACTGTATCAGCCCTTGTAACACTCCTATATTGGGAGTGCAAAAACTTAACAGGGATTG
GTTCCTAGTACAAGACCTCCATCTAATAAATGAGACACTGGTCTCATTACATCCAGTGGTGCCCAATCTCTACACTC
TTCTTTCACAAATTCCAGAAACAGCAGCATGGGTTACTGTATCATATTTAAAAGATGCCTTTATTCTGCATTTCCTT
GACTAAGGCTTTGCATATATAAATTCTCAAAATATGGAAGGTAACTAACTGACCAGAATTAATTTTAGGTTCAAGTC
AACTGGGAAATATTCAGTATTAAATTAATATCTTAAATTAGAATTGAAGTTTGCTGATCTAATTAATACACACATGT
CGTTACAGCTGTCAACATTAGGTATAATATCTTATCGTACCTAGGTTTAACAGAAGTCAAATGAGACACTGAGACAT
CAGTTACTAAACAGAAACTAAAGGTATTTAGAATAATTAATCAATATGATCAGTTTCACCCTGAATGGTCTCCATAA
GAAAAACATGTGTTTTTAGAAATTATAAAGGACAGTCTGTGGTTGCTTTAGAAACGTAGAATCTGTGTGCTTTCAAT
ATAGAAGGAATGAGGGATGGAACTGCATTTTATGAAGGCAAAAGAAAGTCTGTCTTCAGCTGATTGCTCTGGTTGGA
AAATAAGGGACAGACTAATATGGATACAGAAAGTGATACAAGGTGTGTGGGAAGTGGACACTGAGAATTTTGTGCAT
GGTGGGGACTGTCTATATTTGAGTAAGTTAACTTTAAAAGTAATGTGGTGCCATAAATCATACTGCTCACAAGGACA
TAAGGTAGCTTTCAATTACATGTTGACCAAGGCATACAAGTGTTTCATAACCAGCCAGAGAAATCAGAAAAATCATA
CAAGTTACCTGTGCTATTATAAAATCTAAATGTTGTATTCTTGATGGTTCACAGAATGTGTCTAATTCCCTGCTAGA
TCTTCAACAGTAGATTCATGAGCGGTCCTATCCAGCTCCAGCTTTTGGAGCTGCCCTGTGGAACCAGCCGACCTCCT
CCTCCTGGTGAAAATATTTCTTCACCATATCTTTTTATTCAGACCCTGTATAATTAACTGTATTTCTTGCTTCATTA
CATCCTGATTAAAAGCCATCAGCCTTAAAATGTTGATAGAAGGGGTACCCAAAGCAATGTATCAAAGCCCACTTGAC
CGTCCCATGAGTGGAGACCTAACTGCTTTCCCTAATGACGCCCCTTTTCAGCAGGAAGAAGTCAGAGCGGTCATCGC
CCCCTTTCCCCACAGTTAGAGTCTCTAACTCACTGGTGGGATTGAGGCAGAATATTCACTCAGGTAGTCAGTGTAGG
AACATGGGCTTCGATACATTCTTTGATGTGGCTATTGGTTAACATTTGTAAAGTAAGGGTTGCACAGCAACCCCAAC
TGCTATAAAGGTTACAGGTATTACCCCATGGATCCATCACACCGGAATAAAGAAGGCTGCTCCCGCCATTGACACAG
ACACCTGGGAAGCTGTCCGGCACCCTGAGAACCCCCCTCAGGATCAAGTTCCAGAGACATATGGCACTGGAGGATGG
CAGGCCCTGCTCTGGTCACACCCAGAAGCTGGCCAGTCTATGCACGGCAGAAACTTGAGGAGTCTACAGCCCTGCCC
CAGCCACATACTGGAGTTGGTTGGTTTGTACAAGTGGAGGCCAGAGGATCTCTATGCAAACTTGAATTGAACTCATG
CTCTGGTGGGGAATATTGGTAATTGAAATTGCCATAGCCCTCATATTTGGAGTGGGGCTATATGCAGTATCCCCTTC
AGAATGGGGACAGGGAGCCCAGCTACTCATCTGTGTGATGTATCTCCTGACTGTCAGTATACTAGAATCCCTGTTCA
TAATGGGTCAGTGAAAAGGATCAAAGGAATCATAGTTCTGTTAACACTCACCCTGCTGCTCACTCCAGGGGCAACAG
ACTGGGACAATGATCTATGGGATGGGACGGGATTAACAGATGCTTACCAGTGCCTCCCTGCTAATTGGACAGGGACC
TGCACTCTAGCCTTTGTCACTCTTCAAATAGATATTGTCCCTGGGAATCAGTCTCTTATGGTGCCCATAGAGGCACA
TGGCAGAACAAGACAGCAATGCAAGTTATCCCCTTATTTAGTTGGTTTGGGAATTCCAGCAGGGATAGGAGCAGGAG
TGGGAGGAATAGAATCCTCCACTGCTTATTATCATCAATTATCTAAAGAATTCACGGATGATGTGGAACAAGTAGCC
CCTTCCCTAGTAGCCTTACAGGATTAGGTAGACTCTCTGGCAGAAGTGGCCCTTCAAGACAGGAGAGCACTGGACTT
ATTCACTGCTGAAAAAGGGGAACTTTGCCTGATGAAGAATGCTGTCTTTATGCCAGCAGATCTGGAATAGTCAGAAA
CATGGCCCAACAAATAAAAGAACGCATAGCAAAGAGAAGGGAAGACTTAGATAACTCCTGGTTAAATTGGAGCAACT
ACTGGAGTTGGGTGGCATGGCTCACGCTTTGGTTGGGCCCCTCCTCATGCTCTTCATGGCCCTCACATTTGGCCCCT
GTATCCTGAACTGTCTTGTCAAGTTTGTCTCCTCAGGCCTAGAATCTATAAAGCTACAAACGGTGGTGATGTCCCGG
CCACACTTATATCAGCCTCTGGGCCAAGAAGACCAGAAAGGTTGATGCTTGCTCCAAGAATGTGAAAAAGCATCAAG
AGGGGGGGATGTAGGAGAAAATGTCCCAATAAAATGTGGAAAGGAGAGACCCCGGCCATGACGACTAAGCAAAGTCT
AGCCAACTGCCCCAACCAGTCCTCCCCCATGCATCTGCTTCTGTAAATTTGTTTCCGCATCTACTACCTTGCCTGAC
GTCACTCCAGTCCAACTACCCAAGCTTGGACCTGGAAGACGTAGCCCATAAAAGCCTTGTGAAACCCTTCTTCCAGG
CTCAGACTCTGGAGAGTGATCTCATCTGAGCCCGCCGGCGTAATAAACCTGAGTTCTCCAACTCTCCAAGTGCTTGC
TTGGTTTCTCGCCGGGTAAAAGAGCTGCTCCACTATGGCCACAGAGCTACTGGAGCTGGTACGCTACAGCCACGGGG
CTGTCGCCAGAGCTGATACGCTGCAGCGCAGGGCTGCTGGGTATCTGCTGTAACACTGAGGGTGCAGCCCGAAATGG
TAAAAAAAAGAAAGAAAAGAAAAAAAAAATAGTAAACTTGCAACCACAGTAAGTATATAACGGAGTTCCTGTCATGG
CTCAGCAGGAAAGAATCCAAGTAGGAACCATGAGGTTGGGGGTTCGATCCCTGGCCTCGCTCAGTGGGTTAAGGGTC
CAGTGTTGCCGTGAACTGTGGTGTAGGTCGCAGACATGGCTTGGATCTGACATTACTGTGGCTGTGGTGTAGGTCAG
AGGCTACAGTCCCAATTAGACCCCTAGCCTGGGAACCTCCATATGTCGCGGGAGCGGCCCTAAAAGGACAAAAAGAC
CAAAGGGAAAAAAAAAAGAATGTATATATATGTATGAGTGAGTCACTTGGCTGTACAGCATAAATTGGCACAACACT
GTAAATCAACTATACTTTAACTTTTCAAAAAGATTAAAAAAGAAGCATTGGCGTTATCCTCAAGTACAGCTGGATTC
CCATCTGCTCCTTATAATGCTGCCCTTGGGCAACCTCCATTCTCCATGTTCACAGCTCTGAAGTGGACATAACTCTT
CCAAGAGTGTTGCTGGGCGCATTAGAGGCACAATCTAGAACAGGGCCTGTACGTAACAGATAAGTGCTCCACAGTGG
ATGAAATGAAATGAATTCACCAACAGGAAGTAACGATCATTTCCTGGGTTGGTAGGGTGTGTTGTAGTGAAACATCC
TTTCTCAGAGGGACAAAGATCAGAAATGCACATTTCAAAATCAGACACTCTTTAATTTAAAAAAAAAAAAAGAAAGA
AAGAAAAGAAAACGAAAAAGGCAAATAAACATTTAAAAGAGTAAGTTTCTTCTGAGGAAGAAACCTGTTTCCCAAGG
TCACCCAAGCCAGCAGCCTTAAAATCTTAGAGACATAAACACAGCAACATGGACTTGCCAGAATGTTCGGTTGGCAC
CAGTTTGGATCCTGGTATCAAGACTCCTGGTCATTCTCCTCATTCACTAAGGAATGTGGGATGAGATAATTTTGGGG
AAGTGCTGGAAGGAAAGCCTTAGAAGGGACTTTAGCTGGTAACGCAAGAGCTACCTCCCTTTGCTGAGTTCTGCCAT
AGCCTCAGTACAAACGTGTTTCTTGGTTTCCTTATTTGTTTCGGCAGCGCCAGGGCATGAGGAAGTTCCCCGGGTGG
CCAAGGATCAAACCCTTGCCACAGGAGGAAAAACGCTGGATCCTTAACCTGCTGCACCATCAGAGAACTCGTATACT
TCATTTTAATCCTCATAAAACATCATCTAACCAACACGGTTCCCCCCCTCCCCTTTTTTAAGCCATTTAGGGCCGCA
GGTGCCTGTGTATGGAGGTTCCCAGGCTGGAGGTCTAATTGAAGCTGTAGCCATCGGCCTACACCAGAGCCACAGCA
ACGCGGGATCCGAGCCACGTCTGCGACCTACACCACAGCTCACGGTGACACCGGATCCTTCACCCACTGAGCAAGGC
CAGGGATGGAACTTGCAACCTCATAGTTCGTAGTCGGATTCGTTACCCACTGAGCCACGACGGGAACTCCCACAAGA
CGTATTTCTGATCCTTCTTTCTGTTTATAAAAATTAAATGAGCTCACCAAGTCCGCACTTCCTCCGTTAATTATTAT
GCTACTCAGAAGTTTTTTTTAGCACCCCAAACCACAAAACGGACGCTCGCTCCACCGCGAGGCTGTCTTCCGGAGCA
GAAAACTGACCTTTTAAAATTTTTTTTTCTTTTGGTCTTTTTGGGGCCGTACCCTAGGGCATATGTAAGTTCCCAGG
CTAGGAGGTCTAACCAGAACTGCAGCCGCCGGCCTTACGCTGCAACTAGATGCTACGCCAGGTCCGAGTGCGTCTGC
GACCTACACCACAGCTCACAGCAACATACCCACTGAGCGAGGCAAGGGATCGAACCCGCGTCCTCGTGGATACGGGG
GGCGGGGAGGGGCGTAAACCGTTGAGCTAGAACAGGAACTCCTAGAAAACCGACTTCTTCAAAAACTCTGCCTCTAA
AACCCCCAAGCTGTTATTTAATGCAGCGTAAAGGACGCAGCCTCCGCTTCCCCACAGCCTGGGGCCCCACAGCCTGG
GGCCCGCACATCCCCCGAGACTTACATCCCCAGCCCTGGTCATAACCTCCGAGTTCCGGGCCGCCCCCCGTGCTCTG
CGCCACGAGAGGCAACCTCCACGTCGAATGTTCCCCTGGAAAACCAGTGTTCCTTGGGGCGCAGGGCGGGGGAACGA
GCAGGAACTCTCAACAGCGTCCCGAGGCGCAGTCTCCTTCTCGCTGTCTCACCGACGTACGGAGCCGGTCGGACTTA
TTTTGGAGACCCGCCGCCCCCCCTACTCGGCTCCGGGGTCCCGGGACCTGGCCGCTCCCGGGTGGCGCCACTGGCTG
GCCAAGTTTGACTTCCCATTTGTCTCTGCTCGAGGGACACGCACCTGTACGAAGTCATCCTTAATCCCGCCGCCTCG
GGACATTCTGGGCTGGTGGTGCCACTCCGCGGATTGGACAGCCCTAGCACCAACCCCGGCAAATTCTTCCTGGTAAA
CCGCGAGAGCTTGGGTCGGACCCGCCCACGTCACCACCAACCCCCGC

| | |
|---|---|
| SEQ ID NO: 24 | B4GALNT2 cDNA Sequence |

TCCGCGGAGTGGCACCACCAGCCCAGAATGTTCCGAGGCGGCGGGATTAAGGATGACTTCGTACAGCCCTAGATGTC
TGTCGATCCTCAAGATATTGATGGTGCTTTTGGTCCTGAGCGTTGGACTCTTTATGTTCCAAAGCGTGTTCCTCGAT
ACAGACTTCAGTCTCCTCAACTCACCCATCCCGTCCCCCACCCTGGATGCGCAGACGCTGAAGCTTCTACCTGAGAA
ACCCGATTTCTACGGTGAAAACGGGCTGTTCCCGAAAAACCAGTGCCAATGTGACGCCTTCGGGCATCAGGAAAGCT
ATAACTTGGAGGATGCCTACGACCCGCAAGACCTCCCCGCAGTGAACCTGAGGAGACAGGCTGAGCTCGAACACTTT
CAGAGGAGAGAAGGGCTCCCTCGCCCACCGCCCCTGCTGGCTCAGCCCAACCTCCCCTTTGGGTACCCGGTCCACGG
GGTGGAAGTGATGCCTCTACACACCATCCCCATCCCAGGCCTCCGGTTTGAAGGACCTGATGCTCCCATCTATGAGG
TCACCCTGACAGCTTCTCTGGGGACACTGAACACCCTTGCTGACGTCCCAGACAATGTGGTGAAGGGCAGAGGCCAG
AAGCAGCTGAACATTTTGACCAGTAGCCGGGAGCTTTTGAATTTCATCCTCCAGCATGTGACATACACGAGCACAGA
GTACCACCTCCACAGAGTGGATGTGGTGAGTCTGGAGTCCAAGTCCTCAGTGGCCAAGTTTCCAGTGACCATCCGCT
ATCCTGTCATGCCCAAGTTATATGACCCTGGACCAGAGAGGAAGCTCCGAGACCTGGTGACCATTGCCACCAAAACC
TTCCTCCGTCCCCACAAGCTCATGACCATGCTCCGGAGTGTTCGTGAGTACTACCCAGACCTGACGGTGATCGTGGC
CGATGACAGCAAGGAGCCCCTGAAAATCACTGACAGCCACGTGGAGTATTACACCATGCCATTTGGGAAGGGCTGGT
TTGCTGGCAGGAACCTGGCCATATCTCAGGTCACCACCAAATATGTGCTCTGGGTGGACGATGACTTCATCTTCAAC
AGCAAGACCAGGATCGAGGCGCTGGTGGACGTCCTAGAGAAAACGGAACTGGACGTGGTAGGTGGCAGCGTGATTGA
AAACACATTCCAGTTCAAGCTGTTGCTGGAGCAGGGGAAGAATGGCGACTGTCTCCACCAGCAGCCAGGATTTTTCC
GGCCCGTGGATGGCTTCCCCGACTGCGTGGTGACCAGTGGTGTTGTCAACTTCTTCCTGGCTCACACAGAGCGACTC
CAAAGAATTGGCTTCGACCCCCGGCTGCAGCGAGTGGCTCACTCAGAGTTCTTTATTGATGGGCTCGGGAGCCTGCT
CGTGGGGTCCTGCCCACACGTGATCATAGGTCACCAGCCCCATTTACCAGTGATGGACCCAGAGCTGGCCACCCTGG
AGGGGAACTACACCAGTTATCGGGCCAACACCGAAGCCCAGATCAAATTCAAGTTGGCTCTCCACTACTTCAAGAAC
TATCTCCAATGTGTCACCTAAGGTATCCGGGCATTGGAAAAGCGCTGAGCTGCCTGGTTGCAAGTATCTAAGACAGC
GGATGCGGTGGCTGGGATACCAATATTTGAACTCCTCATAAGATAAGCACTGTAATGCCCAGGGAGCAGGGTAGGCA
GGTGGGTCTGACTCCGTTACTGGAAGTACCAATAAAAGTACAGGGTCATTAGAAATGGACCAGTCACTGAGGTGGGC
AATGGAGACTTCATTCATAACGATTACGGCGGTGTTTCCATCATGGCTCAGAGGTAGCAATCCAGACTGCTATCCAC
GAAGATGCGAGTTGGATCCCTGGCCTTGCTCAGTGGGCTAAGGATCTGGCATTGCTGTGGCTGTGGCATAGGCTGGC
AGCTGCAGCTCTGATGCGCCCCCTAGCCTGGGAACTTCCAGATGCTAAGTGTGTGGCCATAAAAAAAAAAAAAAAAA
AAAAAAAAAA

| | |
|---|---|
| SEQ ID NO: 25 | B4GALNT2 Protein Sequence |

MTSYSPRCLSILKILMVLLVLSVGLFMFQSVFLDTDFSLLNSPIPSPTLDAQTLKLLPEKPDFYGENGLFPKNQCQC
DAFGHQESYNLEDAYDPQDLPAVNLRRQAELEHFQRREGLPRPPPLLAQPNLPFGYPVHGVEVMPLHTIPIPGLRFE
GPDAPIYEVTLTASLGTLNTLADVPDNVVKGRGQKQLNILTSSRELLNFILQHVTYTSTEYHLHRVDVVSLESKSSV
AKFPVTIRYPVMPKLYDPGPERKLRDLVTIATKTFLRPHKLMTMLRSVREYYPDLTVIVADDSKEPLKITDSHVEYY
TMPFGKGWFAGRNLAISQVTTKYVLWVDDDFIFNSKTRIEALVDVLEKTELDVVGGSVIENTFQFKLLLEQGKNGDC
LHQQPGFFRPVDGFPDCVVTSGVVNFFLAHTERLQRIGFDPRLQRVAHSEFFIDGLGSLLVGSCPHVIIGHQPHLPV
MDPELATLEGNYTSYRANTEAQIKFKLALHYFKNYLQCVT

| | |
|---|---|
| SEQ ID NO: 26 | C3 Genomic Sequence |

CTCACTTCCCCCCCCACCCCCGTCCTTTCCCTCTGTCCCTTTGTCCCTCCACCGTCCCTCCATCATGGGGTCCACCT
CGGGTCCCAGGCTGCTGCTGCTGCTCCTGACCAGCCTCCCCCTAGCCCTGGGGGATCCCATGTGAGTAATCACAACC
CCAACCCCCAAACAAGGCTGCTTCTGCATTGGGAGTGGGCACTTGTGAGTATAGGTCTCTGCAGGTTTAGGGTGCAT
GTACGGTGCTGGTTGATTCTGTGGCTTGTGATGAGGTTGGGGTGAGTCTCAGAAGTTGGGGTTGGGTGAGTCTCAGA
AGTTTGGACTCCATAGGATCTGGGAGTTTGTAGTTTTAGCATTTAGGAGTTTCAGAGATGCGGTTTGGATGTATGTG
GCTGAGGGGATGGATTGGGTTGTATTTATAGGTCTGGGGTGCTAGAGGTTTAGGAGGCTGTTTAGGGTGTTCCAGGG
TTTGGGTATTTAGAGACTTGAGGTATTTAAAGATTTAGGAGTTCTGACCTTGGAGCAGTGGGTTAAGAATTCGACTG
CAGAGGCCAGGGTCGCTGATCCGGTGCGACCATAAAATGATAAAAAATAAATAAACGATTAAAAAAAAGATTGAAGG
GTTGAGACTTCTGGAATTTGTGGGTTTGATTGTGGGCTTGGAAGTCCATCGTCTTGGAGGAATTGGTTCTGATTTTG
AGGTTCAGGAATTGATGGGATCTGAAGCCCCCAAGCTGTCCTCCAGTCATCGGATCCCCCGCAGGGCTAGGGGCTGG
GGCAGAGCGCTGACCCTGGGGGTGCCTAGCATCTCGTGCCCCTGGGATGACAGCTCTACGCCTCGTCCTCCCCTCCC
GCAGTTACACCATAATCACCCCCAACGTCCTGCGTCTGGAGAGTGAGGAGATGGTGGTGTTGGAGGCCCACGAAGGG
CAAGGGGATATTCGGGTTTCGGTCACCGTCCATGACTTCCCGGCCAAGAGACAGGTGCTGTCCAGCGAGACCACGAC
GCTGAACAACGCCAACAACTACCTGAGCACCGTCAACATCAAGGTGGGCGCGCTCAACAGCCGGACCGCTGAAGCCC
CACCCCTTCTTTGAGTCCTCTTGGTAGCTGAGCCCCTCCTCCCTTTCTGAGCCCCACCCACCCTGCCTGAGCCCCGC
CCCTTCTGTCTGAGTGTCTCCATTCTGAACCCCGCCCCTCTGAGTCTCCTCCCCTTCGGAGCCCTTCCCCTTTTGGA
GTCCGGGTCACTTTTTGGAGCCCCCTCCCACTCTCTCATCCCGGTCTTTCTCTGAGTGTCCCCACCTTCTGAGCCCT
CGTCTTTCTCTCAGCCCGGCCCCCTTCCAAGCCCCACCATGTCTGAGCCCTTCCCCATTTCTGACCCCTCCCCTCCA
ACCCTCCTCCCTAAGTCCTTTCTTCTTTTAGAACCCGTCCCCTCTCCGAGTCTCCTCCCCTTTCTGAACCCCCTACC
CCTTCTGAGCCCTCCTTCCGCTAAGCCCCCTGCCTGAATCCCCCTTCCCATCCCTCCCTCTGACTCCCTACCCCCTC
TCTTGCCCTTTGGCCCTTCCCCGAGTACCTCTTCTCTCCCCAAACCTGGGCAAAGCAGGAGGACCAGAAGTGACAAG
CAGGCTCTGTTGCGAGGAGGGGCGGGTGCGGACCCAGCCGAAGTCCTAGAGGCTGGATGGTGGGCAAGGGGTCTTGG
CCCCTAGTGATCCCCTGGTTCCTGCTCAGATCCCGGCCAGCAAGGAGTTCAAATCAGAGAAGGGGCACAAGTTCGTG
ACCGTTCAGGCGCTCTTTGGGAACGTCCAGGTGGAGAAGGTGGTGCTGGTCAGCCTTCAGAGCGGGTACCTCTTCAT
CCAGACGGACAAGACTATCTACACCCCAGGCTCCACGGGTAAGGGGCTGAGGGTGGCTGCAGAGAGCCAGGGGCAGG
GCTGGAGGAAGGGGCAGGGCCTCACCCGGCTCTGCTTTTCTCTCCCACCACTGCTCAGTCCTCTATCGGATCTTCAC
CGTTGACCACAAGCTGCTGCCCGTGGGCCAGACCATTGTCGTCACCATTGAGGTACCAGCCGACTGGGGCCCCAGAC
ATACCCAGGGCAGGGACTCGGGGAGAGACAAAGAGAGAGAGAGAAACAGAGAAAGGGATTCCGGCAAAGGCCCAGCA
GCAGAGACATAAAGGCAAAAAACAAAACCCCAAAAACGTAAGGGCACACAGAGAGATCGGGAGAGAGGCGGGGACCC
AGCGATGCTTACCGTGGATGACGGCTCCAGATAAGTCCCTGGTCACTGTGTGAATCTGGACAGGTCACTTCATCTTT
CCAAGCCTCAGTTTCCTCATTTGAAGACTGACACGACAGGTACTAATTCTATGTAGTCTGTTCCGCCTACTGCCCGC
CAGAGGGCGCGTGGGAGCACCTGAGTCAGGTTCCACCCCTCCTCTGCCTGCCGTTTTCCAGGGCTCCCCGCTCCTGG
GGTAAATGCCCAAGTCCTCCCCACGGGCCTCAAGGCCCTGCAAGACCTGCTCCCGCACCCTGCCCACCCTCCTTTCT
TCCCTCTCTCTTCCTCCCTCCGCTCCAGCCACGTGGGCCTCGTCACCGTTCTTGCAACAATCCAGGCACAGTCCTGC
CCCAAGACCTTTGCAGGGGTTGTTCCCCCTCCCCCCCAAATGCTCTTCCTGCAAATATCCACACAGTTTGCTCCCTC
ACCTCCTTCAAGTCTTTGCTCAAATGTCACCAGTGTACCAATTTTACAGTGAGGCTTGTCAGAGCGCCCTGTAAAAT
TGCAACAGAACACACACACACACACACACACACACACACACACACACACTCCCTTTTTTGCCTTCCTGCCATCTCTT
TTTGGCATCTTATAAATCGGAGTTATTTCCCCCCTCCCTTTTTTGGTCTTTTTATCTTTTTAGGGCCGCACCCGCAG
CATATGGAAGTTCCCAGGCTAGGGGTCGATTTGGCCTAGGCCACAGCAATGTGGGATCTGAGTTGCACAGCTCACAG
CAACGCAGGATCCTTAACCCAGGGAGCGAGGCCAGGGTTCAAACCCAAGTCCTCATGGATACTTGTTGGGTTCGTTA
ACCACTGAAGCACGATGGGAAGTTTTTTGGGGTTTTTTTTTGTGGGACCTATTCCTTTGTTAACTGCGCCTTCCCCC
AATCTGCACTGAACCTAAGTTCTGTTCAGAAAGGGATTATCTGTTGGCCCAGAGTTTGGCGGGTAGTAGGGTAAATA
AAAACTTACTGGAAGAAGGGAGGGAGGGAAGGAGAGGGGAGTGAGAAGCAGGGAGTGATGGGGAGAGAAAGACAAGT
GGAGGAGGAAGGGGAGGAATGGGGCCTGTCCTCCTTGTGGGATCTTTGTATTTATTGAAATCAGGCAAACCTAACAA
GGACCAGAGTTTTTGTGTGTGTGTGGTATCAGTATGTGTGTGGGGTTTTTTTGGTTTTTGTTTGTTTGTTTTTTGCT
TTTTAGGGCCATACCCTCAGCATATGGAGGTTCCCAGGCTTAGGGTCCAATCAGAGCTACAGCTGCTGGTCTACACC
ACAGCCACAGAAAGGCAGGATCCAAACCACATCTGCGACCTACACCGCAGCTCACAGCAATGCCGGATCCTTAATGC
CGGACTGAACATGCAACCTCATGGTTCCTAGTTGGATTCGTTTCCACTGCACTACGATGGGAACTCCAAGGAGCGGG
TTCTGAAGGCTGTGTGCTCACTTTAGTGATGGTGGAAAACAGAGAACACCCTCCTCTAAAGATGTGGCGCTGCCAGA
CTCCCATTGAACGTCACCTCATGCCATTGGGAAGAACATATCCACAATTACCTCCACTTGCCAGAGAAGCTAGAGAA
TCAGATTTCTCTTTGAAGTCTCCTGATGTTTAGCTATTGGCAACAAATGAAATCATATACTTATTAGGTTGAGCCAC
ACGAAGTTGCTATTCTTGCAGGTCAAAAAGGTGAATGTAGGCAGTGATGTGTGCCTTCTACAAATCAAATGCTCAGC
CCAGGGTCCTATATCAAAGGAGGTGATAAATTCTAGTAATTACTAGTCTTCAGAGCGACACAGATCATCACAAGCAC
TTGCCTACACTAACAGGTCCCAAACCAGTGACACAGGAGCTGTAGTTATCTCCTTTTTCCAAGAGGTTCACATTGAG
CACAAAGAGGTTAAGTAATTTGCCCAAGATCACACAGGCTTGTAAGTGGTGCAGTGGGGACAGGAACCCAGGCTACC
TGGTTTGGGTGCCCATTCTTAACCACTGCCCCTGTAGACACGACACAGAGGAGAACCAAGGGGCTAAGCCTGGTCTC
TGAAGAGCCACTTCCCTTCCTGTCTCCTCACAGACCCCTGAAGGCATTGACATCAAACGGGACTCCCTGTCATCCCA
CAACCAGTTTGGCATCTTGGCTTTGTCTTGGAACATCCCAGAGCTGGTCAAGTAGGTCGGGCCCTCCAGCAGGGGTG
GGGTGGAGTGGTCGTGTGTTTTAGGGCTCCCCAGGAGAGGGAGTGGGGGGGCTGCCAGACCTGGCGGACTCACTAGC
CTGCCTCCCCCACAGCATGGGGCAGTGGAAGATCCGAGCCCACTATGAGGATGCTCCCCAGCAAGTCTTCTCTGCTG
AGTTTGAGGTGAAGGAATATGGTAAGAAGAGGAGGGAGCTGGGGGGGGGGGGGCGTGCATAATGTTGGACCCAGCGT
TGACCCCCCCCACCGAACGAATACCATCTGCTCCCCCCCAATAGTGCTGCCCAGTTTTGAGGTCCAAGTGGAGCCTT
CAGAGAAATTCTACTACATCGATGACCCAAATGGCCTAACTGTCAACATCATTGCCAGGTGAGGGTCTAGGGGGAGG
GCCTGGGGAGAGGGAAGGTCAAGGGATAGGGCAGGGATGGAGGGGGAGGGGCTCGTCACGGCCAGTGGACATTTGGG
GGAAGACTCCTCTTTTCAGGACCGGGGGAGTCTGAGACCCCTTCCCACTTTGCAGGTTCTTGTACGGGGAGAGTGTG
GATGGAACAGCTTTCGTCATCTTTGGGGTCCAGGACGGTGACCAGAGGATTTCATTGTCTCAGTCCCTCACCCGTGT
TCCGGTACCTAACAGTGGCCCCCTCTGAGTAACTCTTCCTCTCCCCCTCGGAAGCCCTTCCCCTCCCTGAGCCCTCG
CTTTCTCCCCCAGATCATTGATGGGACGGGGGAAGCCACGCTGAGCCAAGGGGTCTTGCTGAATGGAGTACATTATT
CCAGTGTCAATGACTTGGTGGGAAAATCCATATATGTATCTGTCACTGTCATTCTGAACTCAGGTGAGGCCCGATCT
GAGGGCGGAGGCTCCGTACCACCATGTGGTCCAGCCTGAGAGGGGCAGCTCAGTGGAGGGGAGAGGATCAGAATGAA
GGGCGACCCAGTCTGGTGGGGGGCGGTGTGTCCAGTCTGAGGGAGGAGGTCCAGAATGAAGGCAGGGTCGGGTCTGA
CAGGGGAGACCTAGGCTGGGACACAAACCCAGTCTGAGGGGGGAGGCCCAGTCAGAGGGGGGAGGCCCAAAATCAAG
GTGGGATCCAGTTCATGGGGGAGACCTAGTCTGAGGAAGGTGGGGTCCGTGTTGAGGAGGGCAGTCTGGCCCTCCCT
CATGGCTGGCCCCCCTCAGGCAGCGACATGGTGGAGGCAGAGCGCACCGGGATCCCCATCGTGACCTCCCCCTATCA
GATCCACTTCACCAAGACCCCCAAGTTCTTCAAACCCGCCATCCTTCGACCTCANNNNNNNNNNNNNNNNNNNNNNN
NNNNNNNNNNNNNNNNNNNNNNNNNNNNNNNNNNNNNNNNNNNNNNNNNNNNNNNNNNNNNNNNNNNNNNNNNNNNN
AGCTGTGGTGTAGGTTGCAGACTCAGCTTAGATCTGGCATTGCTGTGGCTGTGGTGTAGGCCAGAGGCTACAGCTCT
GATTTGACCCTTAGCCTAGGAAACTCCATATGCAGTGGGTGTGGCCCTAAAAAAAAAAAAAAAGTTTTCCCTCCTGC
ACCAGCTCCAACACCCCAAATAGTTTGGTGTGTGTTTTCTAGAAAAAAAAAGATACAGGCAGACCTCGGAGTCAGTT
CCTGGCCATGTTAATAAAGCAAGTCACATAAATTTTTTAGTTTCCTAGTACATATAAAAGTTATGTTTACACTATGC
TATATTCTATTAACTGTGCAACTGCATTGTTTAAAAAAATGTACATACCTTTATTTTAAAATACTTGATTGCTATCA
GAGTTTCCCAGCGGCTCAGCAGATTAAGAATCCAGTATTGTCACTGCTGTGACTCTGGTTACTGCTGTTGATGGGGG
TTCAATCCCCTGGCCTGGAACTTCTGCATGCCGTGGGCATGGCCAAAAAATAAAAGAAGAAAAAAAATTTAAAAATT
AAAAAATGCTTTACTGCTATCAACTATACTTCAAAGAAAAAATTGCTAGAGTAAAAAATAAATGCTTTATTGCTAAC
AAAAGTTAACCATCCTCTGATAACGCAGAGGTCACAAGCCTTTGATTTGTTTTTCAAAAATGCAGTATCTGCAAAAC
TCAATAAACTGAGGTATGCCTGCATTCTCCTACAAACCCACAGTGCAGTCATTAGAATTAGGACGTCAACATTAATT
CATTACTACCCTCAAATCCTCCATCACCATTCAAATTTTGCCAGGGTTTTGTTTTGTTTTGTTTTTTGGTGTTTGGG
GTTTTGAGGTTTTGTTTTTGTTTTTGTCGTTTATAGGGAAAGGATCCTGTCCAGAATCACAGGCTGTGTTTTCTGGT
TGGGTCTCTTCAGTGTCCTTGGACCTGTCTGACCTTTAGAGCACTTTCTTCTTTCTGTGACTTTCACATCCTTGATG
GATACGAAGTACACAGACTGAGATCTTGGGGACTGTCCCACCATCTGGGTCTGCCTGATGCTCCTTCATGACAGCAC
TCAGGTTTTGCATTTTTGGCAGGACTGTCACGGAAGAGACATCGTGTCCTTCTTGGTGCACCATTTCAGGTGACAAA
GGGTACTGATTTATCCCACTCTTTGGTGATGTGTACCCTGATTGCCTGATTAAGCTAATGTCTGCCGGGTCTCTCCA
TTGTAAATGTCCTCTTTATTCCTTTTTAGTTATTTTTAAAAACTTCTCTTTAACTATCAGATAGTGGCAAAATTCAA
GTCAAGAGAGATTTCCCTCCAAATCAGTGTTCACTTAGCCTTTAAGACAACAGGGGTGGATTCCTTATATTGTAATG
TATGATTTTCAAACACAACCGTACTTTTTTTTTCTTTTCTTTCTTCCTTCCTCCCTCCTTTCATCCCTTCATTCTTC
CTTCCTTTCTTCTCTTTTTCTTTCCTTCCTTTTTTTTTTTCCTTACAAAAAAGCACCCACCTCTCAAAGGCAGCCAT
TGATTGCCAAAATGGGCAAACATTTCTAAATTCCTGTAGTGGAAAGCTAGCAGCCCCTGCAGCCCTCCAAAAAGAAA
AAGATTCCCAATACACATGAGCAAAGGATCTTCAGTCTCTTTGCACTTTATAACTAGGCGTGCTGCTTTCTGCTCCA
GTGACCCAAGATGTTCTTTTGCAAAGAGGAACGTTTTTTTGCAAGGAGGAAATTTAGACAAAACATCTGATTTAGAG
GGGTACAGTTTACACATACGTGGATTTTTTTCAACATTGTGTCATTACTTTAACCAGTTGGGGGTGAGCCAGAGGAT
TGATTAAAAGTCAGTACCCCAAAGGCACTTTGATGGATTATTCCAGAGCGCAGATGGATTTAGGCATCTCTGGAATT
CCACCTACTTGGTTGTAAGGCAGACCCAGAGCCAAAATAAAATCTGTTCATCATTTTTTTGAGGAAAGCCCAGCCAG
GGTTGAACTCTGTTCCCGCCCAGCTTGCTGATGGTGTCAAGCTGGCTTTTAAAGGCCACCTCCTCTCCAGCAGTCTC
CATCAAAGTCCAGGGAATCTTTCAACTCACCCCATTGCTTTCAGGAAGGACTTTTAACCATCAGACACAGCAGCAGG
CATGGTACTCAGGGCCCAGGATGCTTCTGGAGGGTCTTCCGTGCAAAGGTTTCATTCCCTCAAAAACCAAAGAAGGG
AAAGAAATCAATACAATTCAGCCTGGATTATTTTTGCCTTTATGCCAACACAGTTGTAAAATAGGGTTTCCCATATA
TTTTATGGAAGAAGGAGCCCCCAGAGTCAAATGGGCCTGGGGTCCCTGGAAGTGATCACATGGTCATGGGTGTGTGG
CAGCTAGGAATCCCTCCGGGGATTGTAGAGATACGTGTCTAAAAGGGGACAGCGAGAAAGTGAGTCTGTTCCAAACC
TGGGTTGTTCCCCTCCTCCCCTCTTCCCCCAAAAGGTGACCTGGATGAAGAAATAATCCCAGAGGAAGACATCATTT
CCAGAAGCCAGTTCCCCGAGAGCTGGCTGTGGACCATTGAGGAGTTTAAAGAACCAGACAAAAATGGGTAAGGCTGG
GATGACCCTGCTTCAACCCCCGCCGCCAGTACCCAGGGACAGCCCCCTCTCATCACACTAGAACTGGACAATGAATT
TGCAGGTACCTGGAGTCCCCCTTCTTTTCTTTCTTGGGGGAATCCCACAACCCAACCTAAAAAAATCAAGCCCTTGG
GCTATCAGCCACTGCCCCACACACTACAGTCCGTTCCTTTCGCATCTACTAAAAATTTATCTTGTGTTTGTTTATTC
TTCATTCATTATATTTTCTTTCTTTCTCACTGCCTGCGCTGTGACTCCTTTTCTCTCTACATTCTGTTTATCATCAT
CTTCCACACAACTCATTTCTTATCCTCACCACCACCACTCTCTGCTCCAAATTTTGAATTTTACACCCAGACTCCTC
TCTGCTATGTGAAGCGCCTACACCCCGTCACTAGTGTTACTCTCTTATCGCTGACCTCCCTTGTACCCTCCCATTTA
TTTCTTTTTTTTTTTTCTTTTGCCCTATCTACCTGCCTCTCTTTCCCATCCCATGTTTGCCATGTTGAATTATGTTT
ATTTAAGAATATGTTTAGAGAGTGATGTCTCTATTGATGATGACTACCTGCTGTCTCTCATCCGCGCGACATATTCA
TTATTTATACCATTTGGCGTACTTCACTTGTCTAACACAATCCTTATCCGTATATAAAGAGATGATGAAGAACCCCC
CGCCCGCCCCTGNNNNNNNNNNNNNNNNNNNNNNNNNNNNNNNNNNNNNNNNNNNNNNNNNNNNNNNNNNNNNNNNN
NNNNNNNNNNNNNNNNNNNNNNNNNNNNNNNNNNNTAACCCACTGAGCAAGACCAGGGATCCTTAACCCGCTTTGCA
CAGCAGGAACTCCTGGGCTTTTTTTTTTTTTTTTTTTTTTTGAGCCCTGAGATTTTTTAATCCCCCCCCCCTTTTTT
TGGCTTTTCTAGGGCCGCACCCGTGGCATATGGAGGTTCCCAGGCTAGGGGTCTAATGGGAGCTGTAGCCGCTGGCC
TACACCACAGCCACAGCCACAGCCACTCAGGATCCGAGCTGCATCTGCAACCTACACCACAGCTCATGGCAACACCA
GATCCTTAACCCACTGAGCAAGGCCAGGGATTGAATCTGCAACCTCATGCTTCCTAGTCAGCTTCGTTAACCACTGA
GCCAGGATGGGAACTCCCTTAAATTCCTGACATCTTCTCAACATCAACTCTCTTCTCAAGATCAACTCTCTCTCATC
TCATTTTTTTTTTTTTTTTTTTTTTTTTCTTTTCTAGGGACGCTCCCGTGGCATATGGAGGTTCCCAGGCTAGGGGT
CGAATCGGAGCTGTAGCCACCAGCCTACAGCAGTGTGGGATCTGAGCCGCATCTGCAACCTACACCACAGCTCAAGG
CAACACCAGATCCTTAAGCCACTGAGCAAGGCCAGGGATCGAACCCGAAACCTCATGGTTCCTAGTCGGATTCGTTA
ACCACTGTGCCACAACGGGAACTCCCAAAATAAGAGATTTTTAAAAACCGTTTTAGGATTCCAGAAACAACTGAGCA
AAAAAATATACCAATGGCTGAGTAATAGTCCATCATGTATCTGTACTACATCTTCTTTATCCACTCCTCTGGACACT
TAGGTTGCTTCCGTGTCTTGGCTATTGTCAGTAGCACTGCAGTGAACACCTGGTGCATTCAAATTATGGTTTTCTTC
AGTCTTTTCCATTTTTAATTCCTTTTTTTCCTTTCAAATAGAGAGCAAGGGGTCTAGCTTTCCTCAGGCAGCATAAG
CTAACCAATATTTAACACAATCATTCTATTTTCCTTGAGGACACTCTTATTTATAGCACAAGAACCTGGTTTCTCAC
CCATGTCCTAAATTAAATTTAAGTTTAGAAAAATTTATAAAAACAAATAGTAAGTAAGAAATGGTAAGGAGCACCAG
TGACTAATCAGACACCCCGAGGGTGATGAGTAAATGACAGTAGGTTGGGAAATAAGGATTTTGTTCAAGCCTCTGAT
TATAATTTTTTTTTTTGCTCTTGAAGAATAAGAACAATGCACAAATCTTAATAGATTTCTTAGTGTAACATTATTAA
TAATGTGTTAACAGTTTGTGCAGTTTCACTTGCATCAGCACTCTGCTTGCATTTGATCAGGTAATTTTTGTGTCATA
TATAACATTGTTTTCAGCATCATTTTTGATCAAGGTTGTTATCAAAATTCAACGGAGTAAATTTGAAGATGTAATTG
GCTTTATTAAACAATTCATGAATTGGGCAGCGTCTCATCTGGCAGGCAGAGAGATACTCAGAGGAGTTGTGAAAAAT
GGAAGGTTTTAATAGAATGAAGTCTAGGGCAAGAGAGTAATCGCAAGATACAAATTTCATCATTGGAGGAAAATAAC
AATTCAGGTGGGAGAGGATCTCCTTGGCTGAGCTACAGTATTTTCATTCGCTGGGCTTTTTACTGGGCAGGAAGAAA
GTCTTCCTTCCTCCTGCTGCAGTAAATTTCACTTCCTATTTGGGAGTGCAAGGTACTTCTCTTTCCTTTGGGGTCTG
TAATTGATGCTTCTTCCTGTTGGGATCTGTAATTGACATCTTCCTGTTTGGGGTAATTGACTTGCTTGGTGGAGCAT
TAGAGCTCCCTCTACAGGCCTTCCCTACTTCAATTTAGTTAAGGTTTACTTTTACTAATTTTTACAATGTAAATCAG
TGCTGTCCATTAGAAATATAATGCAGGTTGTAAACGTCATTTAAAATTTTCTGATAGCCCTGTAAAAAAGGGATAGG
TGAGTGAGTTCCCTTGTGGCACAGTGGGTTAGGGATCCTGCATCATCACTGCAGCAGCCCATCCCTGCTGTGGTGTG
GGTTTGATCCCTGGCCCAGGAACTTCCACATGCTGTAGGGGCAGCCAAAAAGAAGGGATGGTAGGTGAAATCAATTT
TAATAATACATTTTATTTAATCCAAATATATCCTAGGAGTTCTCATTGTGGCTCAGTGGGTTATGAACCCAACTTAG
TGTTGTGAGGATGTGGGCTGGATTCCTGGCCTTGCTCAGTGTGTTAAGGATCCGGCACTACCTCAAGCTTTGCATAG
GTCGCAGATGGGGCTGGAAGCTGGTGTTGCTGTGACTGTAGTGTAGGCTGGCAGTGACAGCTCAGATTCAGCCCCTA
GCCTGGGAACTTCCACATGCTGCAGGTGCAGCCCTAAAGAGAAAACAAACAAATATATCCAAAATATTATTATTTCA
ACATTTTGTAAAAACTTGCAAAACCACTATCACACTGATACTGTTACAATAATAAATCCATTAATATTTTAAAATAA
GCTATTAATAATCTCAAAATTGTGATATCTTTTAGTTTTATTTGTACTAAGCCTTCAAAATCTGCCATGTATTTTAT
ACTTACTGATATCTCAATTAGAATGTTAGCTTTTCATTAGAAATACTTTGATCTGTAATTACCATCCATAAAATTTA
CAGTTAAAAAGGAAAGTGTACCCAAGTTGTTGTAAATATTCTTTTTTCTTTCTTTTTTTTTGTATTTTTGACTTTTC
TAGGGCCACTTCTGCGGCATATGGAGATTCCCAGGCTAGGGGTCTAATTGGAGCTGTAGCCACCGGCCTACGCCAGA
GCCATGTCTGCAATCTACACCACAGCTCACAGCAATGCCAGATCCTTAACCCACTGAGCAAGGACAGGGATTGAACC
CGCAACCTCATGGTTCTTAGTCGGATTCGTTAACCACTGTGCCACAATGGGAACTCTGTAAATATTCTTTAAAAAGT
TATCCAGTCACTGAATCAAGCATCCTTTTAAAAATTGAGATACAGGAGTTCTCTGGTAGCCTAGCAGTTAAGGATCC
ATTGTGCCACTGCTGTGGCTCAGGTCGCTGCTGTGATATGGGTTCAATCCCTGGCCCAAGAACTTTCACATGCCATA
TGCACAGCCAAAAAAGTGTAAAATAAAACAAAATTGTGATCTAATTCACATACCACAAAAGTCACCCTTTGAAAGTG
TACAATTCAGCGGTTTTTAGTATATTCACGATGCACATTGTTTTTGTTTTTTGGTATTTTTTTTTTTAGGGCTGCAC
CCACGGCATATGGAGGCTCCCAGGCTAGGGGTTGAATCAGAGCTGCAGCTGCTGGCCTATACCACAGCCACAGCAAC
ACCAGATCTGAGCCATGTCTGTGACCTACACTGCAGCTTGAGGAAATGCCACATCCTTAACCCACTAAGCAAGGCCA
GGGATCGAATCCATATCTTCATGGATACTAATTGCATTTGTAACCACTGAGCCGCAATGGGAACTCCTGCACAGTGT
TTTTTCTTTTCTTTTTTTTTTTTTTTTCTTGTCTTTTTGTCTTCTCTAGGGCCGCTCCTGCAGCCTATGGAGGTTCC
CAGGCTAGGGATCCAGTTGGAGCTATAGCCACTGGCCTACGCCACAGCCACAGCAACACCAGATCCGAGCTGCATCT
GTGACCTACACCACCGTTCATGGCAACACCGGATCCTTAACCCACTGAGCGAGGCCAGGGATTGAACCCGCAACCTC
ATGGTTCCTAGTCGGATTCGTTAACCACTGAGCCACGACGGGAACTCCTGGTTTTTAAGTTGAAATCTGAGTTAACT
AAAACGAAATAAAAGTAGGAATCCAGTTCTCAACTGAGCTAGCCACATTTCAAGTGCCCAGGGTCCACTTACAGTCA
TCATTTTGGAGAGCACAGATCAGAACCTTCAGTTATGCTTGCCTTCTTCCCTTCTGCATATTTACCTATGAATAACA
TTACAAAGAAAATGAGAATTTCTCTCACAGCAACTCCCATCCACCACCACCACCTGTAAGATATCACTATTAATGAT
GTGTCTCTGGGCTCTGCCAGGGCAGGCGGAGCTTGGGACAGCTCTTGTGGTCAGGGGTGAGCCCTGAGATATTGGCA
GGGTCAGGAACTTGGACCTGAACTTGGATCCAGCCCACCCTCCCTGCCCCCTACCACCGACGCTGTGTTCTGTTTCC
ACCTGGGCAGGGATCTGCGTGGCTGACCCCTATGAGGTTGTGGTGAAGCAAGATTTCTTCATCGATCTGCGTCTCCC
CTACTCCGTTGTGCGCAATGAGCAGGTGGAGATCCGAGCTATCCTCTATAACTACAGGGAGGCAGAGGATCTCAAGG
TGAGCCTCTAGTGTGACAGGCATGATGGGGAGCTTGGAGGGAGGGTCCATGGCACACTCTCCTGACTTGATACTCCC
TCTTCCTGGCAGGTCAGGGTGGAACTGCTCTACAATCCAGCTTTCTGCAGCCTGGCCACCGCCAAGAAGCGCCACCA
ACAGACTCTAACGGTCCCAGCCAAGTCCTCAGTGCCCGTGCCTTACATCATTGTGCCCTTGAAGACTGGCCTCCAGG
AGGTGGAGGTCAAGGCCGCCGTCTACAACCACTTCATCAGTGATGGTGTCAAGAAGACCCTGAAGGTCGTGGTGAGT
CTTTGGGGATACCTGCTGCCCCTTGTCCTTCAGGAAAGACTCCTGTCTTCCTGTGCTGTGAACCCAGGTTGGAGACC
CAGGCTAAGAATACGGAGTACTTCTCAGAAAATTTAGGAGTTCCGGAAGTTTGGAAGCAGGGCTGGGATTAGGGTGA
GGCAAGTGAGGCATTCTCCTTGGGCATGGAATTTCAGGGGACACTCCAAAGCTTAGTAACAGAGATCAATGATATTT
TTTCGTTAAAATATAGTTTAATGTCAAATATGACATTTCGTAACACATTTCAGCAGAGGAGTTTTCTCTTGACTAAA
AATCTTGGGAGGAGTTCCCATTGTGGCTCAGTGGTTAACGAATCCGACTTGGAACCATGAGGTTTTGGGTTCGGTCC
CTGGCCTCGCTCAGTGGGTTAAGGATCCAGCGTTGCCATGAGCTGTGGTGTAGGTCGCAGACACCGCTCGCATCCCA
CATTGCTATGGCTCTGGTGTAGGCCAGCGACTGTGGCTCCAATTAGACCCCTAGCCTGGGAACCTCCATGTGCCGAG
GGAGCGGCCCTAGAAAAAGGCAAAAAAAAAAAAAAAAAAAATCTTGGGAAAGCATATTTCACAGAACAAATATTATA
AAGCCATAACATACAATGCTAGAACAGAGGAAACGTCTATTTCTACCTATGATTCTTACCTTAAAATATGCATTAAC
AGTTACTTTTCCATGTCCTATGATTAAACATATAATAGATAAAATCAACAATAAAAATAAAAGTATTATCATCTTTT
AGTAACGTTTTAAAGCAAAATGTGAGATCATAAACAAGATCAAAAATATTTAATTCAAGAGTACCTGTTGTGGCTTA
GCGGTAACAAAAATATTTAATTCAAGAGTTCCTGTTGTGGCTCTGACTAGAATCCATGAGGATGTGGGCTTGATCCC
TGACCCTGCTCAGTGGGTTAAGGATCTGGCATTGCCATGAGCTGTGGTGTAGGTCATAGAAGCAGCTTGGATCTGGC
ATTACTGTGGTTATGGTGTAGCCAGCAGCTGCTGCTCCAATTCAACTCCTACCCTGGGAACTTCCATGTGCTGTAAG
TGCAGCCCTAAAAAGACAAAAAAAGTAATGCAATATATTAAGAAATCAAAATTAATGCCCCAAACCCTCACAACAAA
CAAAATATCAAAATTTTAAATAGAGACAGGATCTGACAGTGTCAAGGCAAACCATATTGGAGCCTGAAGCAGAAGAA
AAATGAGTTGCTCCATAAATGTGCCTGTATGTATTTTTAAATGGTTAATTTTCCCCAAAAACATTACAGTAGCTGAA
AAAATATTGAAACATTGAAAACCAAGTGTATTAAAATTGACAGAGTGATTTTCCATTGAAGTATTTTGTTTATACCC
AAACCAGAATTTATTATAATTTTTCTTTATTGGCTTTAATAAAAGCAAACTCATATTTTTTTCAACTACTTTACTGT
TCTGGAATAAAATTAACCATTAAAAATATGTGAAAGTATATATTTTGGGGCACATATTTTTCTTTCTTTTCTTTCTT
TTTTGGGGGGTGTCTTTTTAGGGCCGCACCATCAGCATATGGAGGTTCCCAGGCTGGGGGTCGAATTGGAGCCATTG
GCCTATGTCACAGCCACAGCAACGCCATTTCTGAGCCAAGTTTGTGACCTACACCACAGCTCATGGCAATGCCAGAT
CCTTAACCCACTGAGTGAGGTCAGGGATAGAACCTGCATCCTCATGGATACTGGTCAGATTGGTTTTCACTGAGCCA
CGATGGGAACTCCACACACATTTGTCCTTTTGCCTTGAGTTTCTATATGGCTCAGCTTGGGCACTGGTGAGAAGAAA
GCCAGGATTTTGTTAGAGTTTATATTGCCCAGCTCCCAAAAGCCAGTGTGCCCATCACTTCACAATTCTGTACTCAC
TGTGGCTGGTAGCTTGAAAATCACCATGTTGGGAATATTTACACCAAGGAAATTGGCAGCACTACAAATTAGGAACT
TTTCTTCCTGAAAAGCTGGATGTTATATATTTACCAACACACCATTGGAGGCATCTTAGTCTGCAAAGGAAAATCTG
GGAATTACTACCAGGTGAAAGGAGAATGAGTTCTAGGAAGACAAAAACAGCCACCGTCCACCATGGAGATTTATGTG
TAGACACATAAGGGCTTGTAGTGGGCCTTTGATCCTAATTAAGACAGTTCTGATTTTAACTGAGCCCTTACTATGTG
CTAGGCACTATGTTAAATACTTGTGTGAATCCTTTCATTTCTTTTGTGAGAGGGGGGTCTTTTTAGGACCACACCTG
TAGCATGTGGGAGTTCCCAGGCTAGAAGCTGAACGGGAGCTTCAGCTGCCAGCCTTCGCCTCTGCCACAGCAACGCC
AGATCCGAACCACATCTGCAACGCCACACCACAGCCCATAGCAATGCCGTATCTTTAACCCACTGAGCAGGGCCAGG
GATCAAACTCGGGTCCTCATGGATACTAGTCAGGTTCATTACCCTGAGTCACAACAGGAACTCCTCATTTCTTTTTT
CTTTACTATTTATTCTCATTTGTTTATTTGAAAATGTTGTTTTACTTTTAAATTATTTGTTTTATTTTACAATTTTT
ATTTTTATTTTAGTTAGCCTATTGAGAGGCACTGGGTTAAAAACAGACTCTGGAACCAGACTCTCAGGTTCAAATCC
ACACTGTGTTCTACTAGCTATGTGACCTTGGGCAAATGACTTCATCCATCTGTACCCCAGTTCCCCCATCTTGAAAA
TGGAAGTGATAATAGCAGTATCCACCCCATTGAGTCGTTGTGAGGATTAAATGAATTAACCCCAGTAAAGAAATCTT
TTAGGCACATAGGAAGATTTCTATAGATTTTGTTAGGTCATTATTAACTTATAATTTTATTATTAATCTATACAACA
ATGGGTACGAGGTAGATGTTTATATTATGTCTTTATAAGGAAGAGAGCTGAGGCACAGACAGGTGAAGTAAGTGACT
TCCAGTCACACAGCTAAGATCTAGTGGATGCCATCGTGCATATGCTACAGTAATCCCCAGAACAATGCCTCGCTGAC
CAGCTGTCTGTCTGTCTGTCCTTTTCTTCACGGGACTCCCCCTGCCCCCAACACTATCCAGCCAGAAGGAATGAGAG
TCAACAAAACTGTGGTCACTCGCACACTGGATCCAGAACATAAGGGCCAACGTGAGTCAGCCACAGAAGGGGTGAGG
GCTGGGTGGTTGAGGCAGGGTAGGGTGGGAGGGGGGTGGTTGAGGCAGGGTAAGAGTGGGAGGGGGCTGGTGCAATG
GGTGTCTCCCATTCTCCCGGCAGAGGGAGTGCAACGAGAGGAAATCCCACCTGCGGATCTCAGCGACCAAGTCCCAG
ACACGGAGTCAGAGACCAAGATCCTCCTGCAAGGTGAGAGGCCCTTGGCTTCGACCCCAGGGGACCCAGAACTGTGT
TGGGGGGGCATGAGCCCAGTTCCATCTCATCCCTCCTCCTCTTCAGCTAGAATTTCTCTTTGATCTGCTTCAGGAAG
GCTCCAGGCACTATTTAGTTCAGCCAATAGCTTTTGCTGATGAAGAAATTTATTATTTTTTAATGAATTTATTATAT
TTATAGTTGTACGACGACCACCACAACCCAATTTTATAGGCTTTCCATTCCTAACCCCCAGCACATCCCCTCTCCTC
CCACCCTGCCTCATTTGGAAACCATACGTTTTTCAAAGTCTGTGAGTCAGTATCTGTTCTGCAAAGAAGATAGATCA
TTGTAGCTCTGATAAAGAAATTTAAATAAGAAGCAGTATAGTTCCAGAGCAGAAATTCTGGATCTGATTGCCCTGGA
TGGGGAACTCGGGCAAGAAGGGACAAGATAGATCTGAAAAGGCACCTTGCAACCTGTAAGGTGTAAAGTTTTGGGAG
GAGACCCTTGGTTCCCTCATCTGTGACGGGGGCAAATAACAGTATGGTTACCTAAGGGTTGTTGGGTGGGATTAAAT
GAGATACTATACAGTGTTCTCTTAGAATAGAGCCTAGCAAATAGCATTAAGCACGATATAAATATTCCTGACTATTG
TTACTGGAATTATGTTACCACTGGTGTGTAACGAGAGGAACCAGGGACTGGAAATCCCCTGTGAAGCACAAGCTCAC
CCCCACCACTCCGCAAATGCAGAATCCCCCTCCAGCTGCTCAGCTCCTCCCATCACATACCCTCCAGCTGTCCCTGA
CTCCTTTGGCCCTGGCTGGTCAGAGTCTGGAAATGCTGGGGGCAGCCCTGGTCTTGAATGCCATCTTACCGTCTGGC
TGCAGGGACCCCGGTGGCCCAGATGGTAGAGGATGCCATCGACGGGGACCGGCTGAAGCACCTCATCCAAACCCCCT
CCGGCTGTGGGGAGCAGAACATGATCGGCATGACGCCCACAGTCATCGCTGTGCACTACCTGGACAGCACCGAACAA
TGGGAGAAGTTCGGCCTGGAGAAGAGGCAGGAAGCCTTGGAGCTCATCAAGAAGGGTATATGCCGCACCTCCTCCTC
TGAGCTGTCTAGGCCCCTGAGACCCCGCCCCTCCGAGCCCCCTCCAACCAGAGGCCCCTCCCCTCTAGAGGCCCCAC
CTCTCTGAGCCCTCTCCAACCAGAGACTCCGCCCCTCTATAGGCACCACCCCTCTGAGCCCCTCCCAACCAGGGGCC
CCGCCCCTCCTCTGAGACCACCCCCTTGCTCCTCTCNNNNNNNNNNNNNNNNNNNNNNNNNNNNNNNNNNNNNNNNN
NNNNNNNNNNNNNNNNNNNNNNNNNNNNNNNNNNNNNNNNNNNNNNNNNNNNNNNNNNNCCTCTATCTGATCCTCCC
ACTTTCTACTTTAAGCTCCCCTTCCCCACCCCAAACTTGTCCCCTGCTCAGAACCCTCTCTTTCTTCTCTGTACCCC
TGTCCCACCTCTCACAGAATCTTTATCCTCTTTCTAAGCCCCTCCCCTCCCTGGCCTACCCATGGTAGCCACCCCCT
CCACTCAGCCTCTGTTGACACTTCTCCCTTCTCGGCAGGGTACACCCAGCAACTGGCCTTCAGACAAAAGAACTCAG
CCTTTGCCGCCTTCCAGGACCGGCTGTCCAGCACCTGGTGAGTCTCCAAGATCTGCTTGCCCATCCTTAGCCTTGCA
CCTCCCTGAGCAGGGCCTGGATCCCGGCCTCAGGTGGTCTAGGTTGGCCTCGCCCACACAGCCCTGTGCGACTTGAC
CCCTCTACTCACGAAGTCAAAACACCAGCCAGATGAGTGGCCTGCATGCCACACCGGGTCCTGAGTTTGGGGAAGAG
AAACTGGGCGGACCAGGCCAGGCCCCGCCTCTCTCTGTTCATTGCTTGGCTGGGATGCAGTCTTCGGATCCCAGAGC
CAATTGGCTCATGCTCTGTGTCCGCAGGCTGACAGCCTATGTGGTCAAGGTCTTCGCTATGGCAGCCAACCTCATCG
CCATCGACTCCCAGGTCCTCTGTGGGGCCGTCAAATGGCTGATCCTGGAGAAGCAGAAGCCTGATGGAGTCTTCGAG
GAGAATGGGCCCGTGATACACCAAGAAATGATTGTAAGAGGAAGGGACTCAGAGCAGGCAGGGGGAGAGGGGCATCT
GAGCATCACAGGTTAGCGGGGTGGGGGGGTGGGAGGAAGACTCCACCATCCACCCATGGCCCAATCCATTGTGCCAG
GGGACAGGGGATAAGGGAGCTGGGAGTGCCACTCCTCCATTGCAAAAAACAAAGACTTGCAGGATCCGGTGCAAAAG
GAAAGTTCCCAGGTCACAGAGCTGCTTAGAGCCGTGGTCCTCAAAGTGTGGTCCCCAAGCCAGCAGCATCAGCACCA
CCTGCAAACTTGTTAAAAATACACATTTTCAGGATGGACTCCAGAGGCACTGAATCAGAAACAATAGGGGCAACGTC
TAGAAATTGGAGCTTTAACGCACATATACACACATCTCTGCTGATGCTGGTGTGTGCTGAAGTTGGAGAGTTGCTGC
CTTAGCCTGACCTTGCTGGCTTTCACACAGCTTTCTCCTGCCCCCCTTCACACTCTACCTGGACTGCTAGAAGCCTT
GCTCTGTCCAGCCACAGGGCCTTTGAACATGCTGTTTCTGCTGCCTGCCCTGCTAACCCCTGCCCTCTTTGAGAGTT
GACTCCTACTCACTCTTCAGATTGTGGTTCCATCTGTCACCCCTCAGAGACACTTTTCCACGACTGAGTCACTCTTC
CACTGTCCATTCTCAATGCCATCTCCACTTCTCCTGCACAGCACTCATCAGTTTGTAATTATATATCTGTGGATGAC
CTGGTTGGCTCATGTCTGTCTCCCCTACTAGACAGGGAGCTCCATGAGGGCTGGGCTGGGGTCTGGTTTTCTCCCAC
CATCTTATCCACAGCTCCATCAACATTTGCAGAATGAATGAATGGATACTAAAGAGCTTGGCCCTCTTGGGGAGACC
CTGGGGAGAGACCCAGCCCTGCCTTGACCTGCTGATCCTACAGGGGGGTGGTGGGCATGTGGGGACATGATGTTCAC
CCGCTCCGGGCTTCCTGCTTCCCCTCTAGGGTGGCTTCAAGAACACTGAGGAGAAAGACGTGTCCCTGACAGCCTTT
GTTCTCATCGCGCTGCAGGAGGCTAAAGACATCTGTGAACCACAGGTCAATGTAAGTGTCCCTTGCCTCTCCCTCCT
CCCCTCCCCTGCTCAGGACACATCAGGTGAGGTATGGATTTGGGGCCATTTCCAGTCCTCCCAGTGTGACAACCACC
ATCACAGTGGCCATAAGAGTACCTAACATTTATCGAGCCATTAACTAAGATACTCACCTAAAAGCTTCACATGTTTA
AGTCCTGTAATCCTTGTAGCAGCCCAAGAGACAGGCTACCCTTATTATCCCCAGTTTTTAGAAGAGAAAACTGGAGC
TCCCATCATGGCTCAGCATAAATGAATCTGACTAGTAGCCATGGGGACACAGGTCTGATCCCTGGCCTTGCTCAGTG
GGTTAAGGATCTGGCGTTGCTGTGAGCTGTGGTGTAGATCACAGACGAGGCTCGGATCCTGTGTTGCTGTGGTATAG
GCTGGCAACTATAGCTCCTATTTAACCCCTAGCCTGGGAACCTCCATATGCTGTAGGTGCAGCCCTAAAAAGACAAA
AAAAAAAAAAAAAAAAAAAAGAGAGAGAGAGAGAGAGAAAATTGAGGCACAGAGAGATCAAAGATCAGGTCCTTTCC
GCCTGTTCTCCCATTTCTAGAGAGTCATAGCCAATTTCAGCAGAAGTCCTCTCAGTTTGCTTTCCACAGCACTCCTC
CACATGCCTCCTTGCTGCTTCCCTAGAGAAAACTCAAGACACAGAGCTTAAAAAGAGGAGAAAAAAAATCCTCAAGA
CCATTTCCTTAGTTTAGAGGGTCTTTCAGGGTATTTTTTTAAAGGAGTCCATGATCCCAAAAGGGAAGGGATTTAAA
ATGTTGACTATTCACTGTCCCCTTTTCCTCTGGCTTTGGTTCTGAAGCAGAGAAGTTTGAAAAGACAGGCTCTGGAG
AATCTGTAATCACTCCATCTGCTTTGCCCTGGGATTTTGAGGCTGGGTTGCTTGACTTTAGCTTCCCTACAGGGGAA
CCTCAGGCTCTCATCTTCAGCCAGCTGCTTCTACCTCCTCAGAACCCCAGAAAAGGGATGGAGGGGAGGGGCCGTTG
CCTTTAATGCCCAAAAGGGCCCAGGCCTTCCTGGTTCCAACCTGGAAGATTTGAGAGAAATTATAGTAGAAATGAGA
CAACACTAGGACTAGGCACGGGGTAGGGGTGGGGATGTCAGAGAGAAGTGACTTCAAAGCCTGACTCTCAGGCACTT
CCCCTTCAAGGCCTTAATGTGTGCATCTGTAAAACGGGTATGGTGGTCTTTGTATTGTTTAGGACTCTCTGCATTGT
CCTAGATGGAACACAAGTGTGACCCAGATTATGCAAAAATAGGGTATTTATTTTAGGGATCCAAGAATTTATCAAGT
GCAACGATAAAAGAGTCCTCAGGGACTCTGCCAGAATGCTTCGTTTTTCACGTCCTCCCATATCTTTCCTTCCCTTC
TTGCCTAATAATTCAACTTTCCTGGCCATCCGGCCTGCCTGGCCAAACTGTCTTCCTTGGGGAAATAGACCAAAGCA
CCAGCAGCAGAATCTCAGTGACAGATTCTGATTGGCTCACCGTGGGTCAGGTGATCACCTGTGGACCAATCAGCTGA
GGGAGGCAGTAGGTCTTAGTGGGCAACTATGTGCGCTTCTGGTGCGGCCTTGTGAGTGGAAGTGAGGTGTTCTAACA
ACAGTCATCGACAGGTGTAGAAGAGATTCCTGGGCAGGCAAAAGGATCATTTCTACTGTAATATAACATTTTTTACT
ATACATATTATAATGAAGTATGGCATAGGCTGTGGAACCCGACTGCTGGCATTTAAATCAGGAGTATGCTGAACCCA
TCCGTGTAAAATCTGTAAAACCAGTTGTTAAATTTCCAGGAATTTGCAAGCTGGCTGTTAAACACGATCGTGATTAA
ATTAAATTATAAACTTACAGTGAAAAACTGTAAACATTAAACAGTAAAAACAGGCGTTCCCGTCGTGACGTAGCGGA
AACTAATCTGACTAGGAACCATGAGGTTTCGGGTTCGATCCCTGGCCTGGCTCAGTGGGTTAAGAATCCAGCGTTGC
CATGAGCTGTGGTGTAGGTCGCAGATGCGGCTCAGATCTGGCGGTGCTGTGGCTGTGGTGTAGACCGGCAGCTGTAG
CTCCAATTAGACCCCTGGCCTGGGAACCTCCATAAGCCTCAGGTGCAGCCCTAAAAAGACAAAAAAGATTTTTAAAA
AAAGGACAAAAAAAGGAGTTCCGTGGTGGCGCAGTGGTTAACGAATCCGACTAGGAACCATGAGGTTGCGGGTTCGG
TCCCTGCCCTTGCTCAGTGGGTTAACGATTCGGCTTGCCGTGAGCTGTGGTGTAGGTTGCAGACGCGGCTCGGATCC
CGCGTTGCTGTGGCTCTGGCGTAGGCTGGTGGCTACAGCTCCGATTAGACCCCTAGCCTGGGAACCTCCATATGCCG
CGGGAGCCGCCCAAGAAATAGCAACACCACCAAAAGCCAAAAGCCAAAAAAAAAAAAAAAAAAAAAAAAAAAAGACA
AAAAAAAAAGTAAAAACGCAGGTAGTAAACACTTAAAATGTATCACTTCCTAAACATTTTGCTATCTTTTATCATGG
TTCTTTTGAGAATTTATGTGTATTGTACTTGTATAGTGGAAATATTATGTAATGTTGAACTACTGCCCATCTCTTCC
CAAATCTACATTCAATGATGTGGGTTGATTGATGGATTGAAAGCAGCCATGATAATATTGACATCATAGAAATGACA
AACCCTTCAAATTATGTTTTCCCCCAACCCCTATCTTTCTGGGTCACAGCATTTTTCTCTGACAGGAGGATAATGAT
GAAAATAATACCTACCTCATAGTATATTATGAGATTAAGTGAGCAAGTATATGCCTGGGACATAGTAAGAGCTAGCT
ATGATGGGGATTACTCTCAGATAAGAAGTGTTCCCTTGGTGAGCTGAATCTGGCTCACACTAGCTCACGAGTGCCTA
CGGGGGGCATCTCTACCCCACTCCATGTTCAGGGACTTCACATTGGTAGCTTAAAACTGACCATGGTAGAATTTTTA
CACCACAGTAATTGGTGATGCATAAAGGAGCACCCCTCCCCCAACCCCATGCCTCCATTGGAGAGCTGATTGTTAAA
CATTCACCAGCACACCATGGGGTATACAGACTGCCCCCCCCATCCCCGCTGCCAGCACATAGTAGGTACTCAGCAAC
AAAGCAGCTCACAATGAGAAAACTTCAAAAGTAGGTAGTAGATCCAAGGCAGGTCCCAAGGACAGATACCATCCTGG
CGCCCAGGAAGTGATGCTTGTGTGATCCTTACTAGTTCTCTGTGGCAGCAACGCCCACTTGATCAGAATACCCAATC
CTCTTTCTCATAGAGCCTGTTGCGCAGCATCAATAAGGCAAGAGACTTCCTCGCAGACTACTACCTAGAATTAAAAA
GACCATATACTGTGGCCATTGCTGGTTATGCCCTGGCTCTATCTGACAAGCTGGATGAGCCCTTCCTCAACAAACTT
CTGAGCACAGCCAAAGGTAAGAGGCAGCCTGGAGAGATAAAGAAGGGGGTGCATGGCTAGGGTTTGAGGGTGGTCCT
CTCAAGCTGGGATGCATGCCTCTAAGCTGCACTGGGATGTGCATCTCCAAGTGGAGCTGGGCTGGATGGCTCTACAA
GGTGAAAAGCTCTCATTGTAAACCACACAGGAAGGCTCACTGCATAATTCATGACAGCAGTGAGGTGTCATTAAGAA
CATGGGCTCTGACCTCAGGCAGACTGAAACCGAAACCCCACTCAGCCACTTTCTCACTGCCTGACCTTGGACAAGTC
ATTTAACTTCTCTGGACCTTAGTTTCCTCATCTTAATACCTACATCGCAGGGTGGTCATGAAGATTAAATGTATAAT
GCAAGTAGAAGAGAGTCTAGCACACAGTAAGAGCTCTGTCACTGATACCATTAGTGCCTTTAATTTTATTTTAATTT
TTGTCTTTTTAGGGCCACACCTGCCGCATATGGAAGTTCCCAGGCTAGGGGTTAAATTGGAGCCACTGCTGCTGGCC
TATGCCACAGCACAGCAATGCAGGATCCGAGCCATATATGCAACCTAGCTCACGGAAATGCCAGATCCTTAACCCAC
TGAGCAAGGCTAGGGATTGAACCCGCATCCTCATGGATCCTAGTCAGATTCATTAACTGCTGAGCCACAAAGGGAAT
CCACCTTCAATATTGTTAAAAATATTATCATTATCTGAAAGCATAGGGAACTTAGCACAGTGCCTAGCACAGAGTGA
GTGCTTAATTTTTGGTCCCAGCTGATGACACTGTATCATGTTTGCACTCACTGATGTGACATATCTCAAGTAATGGA
ATGTAACATATACAAAAGTCATTTAACACAAGAATAATTTATTGGTGGTGGCCGGCTCTCCTCCACACAGAGATGCA
GAGATCTAGGCCTCTATCTTTTCATAGCTCTGCCGCTCAGAATCCATCCATGTAAGCTGAGGGGGAAATAGTCAGGA
AGACTGTGCAAGGGAGGTGGACCAAACATGGAAGGGGTCCCATCATTGCTGTGCACATTCCATTGGTCAAAGCTTAG
TTATGTGGCCATACCTACCTGCAAAGGCATCTGGGAGATGTAGTCCAACTCTGTGCCCAGGAAGAGGAGGGTATGAT
TCTTAGTGACAGCCTCTGCCATCAGTATTTTCTTAGGCACTTGTGACATACAGTGAATACAGTGCAGCCCTTCCCAT
TATGGCCTCACACCTCAGTTGAGGAGGGAAAATGAATTAATAGATTACTGTAGAACATTATAGCATTGGGATAGTAG
AAGCACAGGATGCTTTAACGGACAGGAGGAAGAAGGGCCTCACTTCCTCTTAGGGTGCCATTGAAGCTGAATTGTGC
GGGGTGAGAATTAACCACAGGTAGATGGAGAAAAATTGCTCCAAGTAGAGGGAACAGAATATGCAAAGGCTCATAGG
TTTAAAAAAAAAAAGAGCAAGTTTAGGGAATCTCCTGCAGTGGGGCTGCAGTTGAGAATTCAAATGGAGGAGTGAGG
GTTGATGAGGGAAGAGAGCAAGGCAGAAGACAGCAGATTGAGGGTCTTGAATGTGGGCCAGGACACTTGAAAACCAA
GTCCAGTATGAGTCTTTTTTTTTTTTTCTGAGCTTTCTCTGAGCTATTTACAGGCTGAACAGAGCATTGAGAGTGGG
GGTTCTCTCTGCAGAAAGGAACCGCTGGGAGGAACCTGGCCAGAAGCTCTACAATGTGGAGGCCACATCCTACGCCC
TCTTGGCTCTGCTGGTAGTCAAAGACTTTGACTCTGTCCCTCCTATTGTGCGCTGGCTCAATGAGCAGAGATACTAC
GGAGGTGGCTATGGATCTACCCAGGCAAGTAGCCCCACCCCCACCCCACCTCCACCCCAGGCACCTGCATCCCAACC
TCTTCTGGCCTCCCACTAGCCTTCTGGAGTAGGCACTGAGACCAAGAGAGGTAGGTCTTCTGTCCCATAAGCCAGGA
TGGTTGGAATGAAGTTGAGAAATCTTTTTTTCCCCCCTTATAAACCCATCTCTGGATCTAGACTACATTCTGAGTGC
TCCAAGCTGTGTTCTGAGCCTCTCTTTCCCTCTTGACATCTAGGTCATGTTCTCAGGGCTCAGGTTCAGATGTGAGC
CTCTCTCTCCCCCTGGTTCCCCAGTTCCACCAGATTCCCTATCTTATCCTGTCTCACTGGTAGGTTCTAGATCCTGT
TCATCTCACCAGACCCCCAATATTACCTTGTCTCATTGGTAGGTTCTAGACTGGATTTTTAGTTGTTCTGGGCCATT
ATCCAAGCTTCTTTCTCTCACTTGTGGGATCTAGACCATGTTCTCAGCTCCTTCAGGCTCTCAATATTACCCTGTCT
TACTGTGAGTTCTAGAAAAGGGTCTCAGCTATTCTAGCCCCCAGTAGGTTCTAGACCATGGGTTCTTTAGCCCCCTT
TATTTCTAGTGGGCTCTCAATCACATTCTCAGTGTTTGGGATTCCAAATCAGATGCTCAGTGTTCCCAACTTTACTC
TTTTTTAATGAGTGGGTTCTAGACATATTCCCAGCACTTCTAGACTCTTGTCTTAGATGCTCTCCTCTAGATGGGTC
TAGACTACTTTCTCACTGTGGCTAGACTTTCAGTCTTATGTCTGCCCTTTCTGGTGAATTCTAGACATGTTCCCCAT
GTCTCCAAGCTCTTGTCTGAACCCCTCTCACTCAGAGAGTTCTAGAACATGTCCTCAGTAGCCAACAACCCTCGATC
TTGTTCTTGAAGGCCACAATGGGTGGGTTCAAGGCCACAGTTTCAGGGCCCCAGCTCTGATCTGAGACTCTTCATCC
CTCAGTGGGGTCTAACAACTTTCTTGTTGCCCAGATTCANNNNNNNNNNNNNNNNNNNNNNNNNNNNNNNNNNNNNN
NNNNNNNNNNNNNNNNNNNNNNNNNNNNNNNNNNNNNNNNNNNNNNNNNNNNNNNNNNNNNNAAGGTAGCTGCGGGA
AACTTTCCCAGGGAAACGGTATTCCGGTGTGAAATGGTATGGACAAGAAAAGCTATTTCTGTGTGAAATTGTTATCC
GCAATCCAGGCTCTGGACCCCTTCCATGAATTTTCTGCAGTCCTCATAGTAGTGCTTCGAGGTAGGGTGACCAAGCT
ATTCTGCCATTCCTGAGACTCTCTCAGTGTTCGCACTCCAAGTACTGCATCCTGGGAAAAACCCCTTCCCCCAAGAC
GGGACCTGGGACCCTTGGCTGCGGGGCTTGCACCTGGGAAATGTCTCCTTGAGCAACAACATACAAAGAAACCAAAT
GGGACTAAAAATAGCTGCATGGGCGTTCCCGTCGTGGCGAAGTGTTTAACGAATCCAACTAGGAACCATGAGGTTGT
GGGTTCGGTCCCTGCCCTTGCTCAGTGGGTTAACGATCCGGCGTTGCCATGAGCTGTGGTGTAGGTTGCAGATGCAG
CTCGGATCCTGCATTGCTGTGGCTCTGGCGTGGGCCGGTGGCTGCAGCTCTGATTCGACCCCTAGCCTGGGAACCTC
CATATGCGGCGGGAGCGGCCCAAGAAATGGAAAAAAGACAAAAAAAAAAAAAATAGCAGCATGCTTGCACAGTTGGG
GCAGATTATGGACAGCAAGATATAAAAAGACCAAAAACCCAGCTGCCATATCTGAGGAGCCAGGAGCAAAAGCTGGG
TGCTGTGCATGCCCTCTGCACACAGCCCCACCAAGGGGGCAGGCAGACCACCTAAGCCACCCCTCTGGCACCCCTAC
CCTCACCCCACTTAAGGAACCAGCTACACACACACACACACACACACACACACACACACACACACACACCTGCCCCA
AGTAAGGGACACACACGCACATCTGCCCCCAGCAAGGGAATACTTGTTTTCCTTTCTTCCTGCTGCAGCAGGAGCTA
AATAAAGCCTTGCCTGAATTTCTTATCGGGCCTCTTACTCAATTTCTGTTGACTGGGAAAGCCAAGAAGCCTCATGG
TTAACACCCCCAGTCTGGGGCAAGCCGGAATGGTCAGTCACTCTACTTCAAGGTAGACATTAGGACTCCCTTTTCCA
GATGCAGAAAAGAGTGCCCAAGAGAGGTTGCCTAACTGTTCCAGGTCAGCCCCCAAGTCAGAACACAGGAGGAGAGC
CAAGCAGACCAGACCACGCTGGGAAGGAGTTCAGGAGATTTGCTCATCATTCTGGCTGTACCCCTCATGGGCTACCA
GCTTTGACCCAGCTGCAGCGGAGCCTATAAGAACCAGTGAATTTGTGATTCTCAGAGGAGGAAAGGGGGAGGGGGAA
AGGACAGAAGAAGAGGGAGGGGAGGAGGAGGGAGAAGGGGAGGAGGAAGAGATGGGGGGAGAGGAAAAGGAAGAGGG
GGAGGGAAGGGAGGCGCAGGGGAGGAGGATGGGGAAGGAGGAGAGGGGAGAAGGCTAACATATTACACTTATGATGT
TCCAAGTATCTACTAAGCACTGCCTATATCTTACCTCGTTTAATCCTCATCAAACCCCTATGGGATTAACTCCTCTT
ACTCTCATTTCCATGGAACCAAAGTCATGGGGCATGGATTGGAACAGCCGAGGTCCCCATGTCAATGAACCCTGGAA
CCAAGATTTGAACCTAGGCAGTGCGACTCCAGAGCCTATCTCATAACAACTCCCCATGGAGTTGAATCCTCAGAACT
TAATCCCATCAGGTAGGCAGGGGTTCATCACCCTACCGGATAATCAGGTGACAAAACCAAGAGATGAAGGCATGTCC
CCAAGGTCTAATTGCCTTCAAGCTGGGGAAGTCTCTTACCAAAATCTGACCACGATCGCCATGGCCACTCACCTGCA
AGCAAAGAGAAGTCTACAGATCCCTTTGATTTTTCTTTCCTCTCTTTTATGGCTGCACCCGCAGCCCATGGAAGCTC
CCGGGCTAGGGGTCAAATCTGAGCAGCAGCTTCCAGCCTACAGCACAGCCATAGCAAAACAGGATCTGAGCCACATC
TGTAATCTGCGCCACAGATCCTTAACCCACTGAAGGAGGCCAGGGATTGAACCTGCATTCTCATGGACACTATGTCA
TGTTCGTAACTCACTGAGCCACAATGGGAAGTCCCTATAGATCCCTCTGAGATCTGGCCATAAGCCATCCTTTCACA
ACCAGGTACCCTGTCTCCCTGGGTACCAGTGATCACAGTGGTGAGTTATGAAAGTGGGAACGGGATGTGAAGAGGAA
AACCCAGTCTCTTTCTGGGGATTTACCTCTATCAGCTCACGAGTTCTTCACACTTTGCCAGGTAAGAAAGGATGGGA
TACCAATGTTCATTGCCGCCCTACACACAGTAGCCAAGACGTGGAAGCAACCTATGCATCCATATGCAGAGGAATGG
ATAAAGAAGATGTGGTATATACATACAGTGGAATATTATTCAGCCATAAAAAAGAAGGAAATCATGCCATCTACAGC
AACATGGATGGACCTAGAGATTATCATACTAAGTGAAGTAAGTCATACAAATTTACAGTTAACCAAGGGGATAGCAG
GGGGTGGGGAAAGATAAATTAGGATTTGGGGATTAGCAGATACCCACTGCCATATACACAAGGACCTACTATATAGC
ATGGGGAGCTATATTCAATATCTTGTAATAACTTATAATGGAAAATAATCTAAAAGTAAACATGTATGTGTGTGTGT
GTGTTCACTTTGCTATACACCAGAAACTAAAACACCATTGTAAATCAGCTATAATTTTTTTTAAGGGTTTGGGAGTT
CCCTGGTGGTCTAGTGGTAAGGACTCAGCACTTTCTCCATTGCTGCCCAGGTTCAATCCCTGATCTAGGAACCGAAA
TCCCACATCAAGCTGCTGCACACCACAGCCAAAAAAATGAAAAAAAAAAATTTTTTTTGTCTTTTTGCTATTTCTTG
GGCTGCTCCAGCAGCATATGGAGGTTACCAGGCTAGGGGTCAAATCAGAGCTGTAGCCACCGGCCTATGCCAGAGCC
ACAGCAACACAAGATCCGAGCCGCGTCTGCAGCCTACACCACAGCTCACGGCAACGCTGGGTCGTTAACCCACTGGG
CAAGGGCAGGGATCGAACCCACAACCTCATGGTTCCTAGTCGGATTCGTTAACCACTGCGCCACGACGGGAACTCCA
AAAATGAAAATTTTTTTAAAATTTTTAATGGTTAAAAGAGGGGGGGAATATCAGCCACTCTTGGCCCCACCCGCATC
CACCTTGCCAGGTTAGCATCCTATCCCCCGCTGTCTCACTAGCCTTGAAGCACTGCCTGACACATCCAGGCATGTAA
CAGCACAGCCTCCGAGCAGGTGAACCTCTGTGGTATAATTCACACTCCAGAGCTCCTCCTGGGACCAGGCTGCGGCT
GAAAATCTCCTGAAACACCTTCTGAGTGGCCATTTCCTCCTCCTGCCCCATCCTGCTTCCCTCCCTGCAAGGGTCTC
CTGAGAGCCCTCCCTCAACAAATGAGTCACATAAAATCCTCATCTCAGGCTTTGCTTCTCCAGAAATGAATGAAAAA
CAAGTGGCGATCCTTATTTTTGTGTTTCAGTTTTGTTTTGTTTTTTCAAATTTTGAAGGTCTCCTGTGGTGCAGTGG
ATTAAGGATCCTGTGCTGTCACTGCAGCGGCTCAGGTTGCTGCTGCAGTTGGGGAGTTCAAACCCTGACCCAGGAAC
TTCCGCATGCCATGCATGTGGCTAAAAAATAAAATGTTAATTGAAGGCACAAGGGAAAGAGCCAGGGTGGGAACCAA
GAGACCTGATGTTATCCCTTGTTCGGCCACCATCTCCTAGCAAGTGGCCAGCTGTGGTTCAACCTCCTGGGACACAA
GTCTCCTCCCCACCACATTGGGCATATGCATTTTCCTCGTGCAACTTACACTGTGCCATTGACTCCAACGGAGATAA
CGTGAATATTACCCAGCTGTAGAAACCACAACACCCTGTCGGAAAGAAAAGGAAAACACCATGAAACATCAAGAAGC
TCTTTAGATTCAACCTGAAAAATTACTTCTGGCACGGCTTCATGGAAACAGGTTTGGGGAGCCTAGATGAAAGCTGC
AGCTGAGTGATATACGTTGTTCAATATAATCTGCACAACAACCATTCCTGCTTTTCTGCATGTCACTTCTGTTTTTC
ATTCTGTTTATATTATCTTCATTTTCTTTTCAAAGAGTTCTAGCTGATTTTCAAAAATATGCATTTAAGTATGCGTC
CTCAAAGGGAACGACATCTCTCCTAAAAGGGCAAAACTGGAGTTCCCGTCATGGCGCAGTGGTTAACGAATTGGACT
AGGATCCATGAGGTTGCAGGTTCGATCCCTGGCCTTGCTCAGTGGGTTAACGATCTGGCGTTGCCGTGAGCTCTGGT
GTAGGTCACAGACATGGCTCGGATCCCGCGTTGCTGTGGCTCTGGCGTAGGCCAGCGGCTACAGCTCTGATTAGACC
CCTAGCCTGGGAACCTCCATATGCGGCAGGATCGGCCCTATAAGGGCAACACGACAAAAAATCAGAGAAAAAAAAAA
GGGCAAAACTTGGTTCTTGGGGAAAGATGAAAAACATTGTACTCTTTTATATACAAGACACATAGATATACATATAC
CATATAAATAAATACACACTATATCTGTAGTATTATTTTTTTTGGTCTTTTGTCTATTTAGGGCCGCACCCACGGCA
TTTGGAGGTTCCCAGGATAGGGGCTGAATCAGCTACAGCTGCTGGCCTCCACCACAGCCACAGCAACACCAGATCTG
AGCTGCAACTGTGACCTACACCACAGTTCACGGTAATGCCGGCCCCTTAACCCACTGAGCGAGGCCAGGGATCGAAC
CCGCGTCCTCATGGATGCTAGTCTTGTTCATGATGCTAGTCTTGTTCATTAACCACTGAGCCACGATGGGAACTCCT
GTAGTATTAATTTTTTTGGGGAGAGTAAGACAATTCATTTTTTTTAATGTCTAAAAGGCAGCCCAGTCCCCCGTATT
TAGTTCCTCTCCAACTACATCATCATCATCACCCTCATCATCACCATCATCTTCAGCATCACCATCACCAGTCTCAC
CAGCATCTTCACCACCACCATCATCATCCCCATCATTATCATCACTGCTATCAACCTCATCATTATCTTCAGCATCA
CCATCATCACCACCACCATCATCATTATCCCCATCATCATCATCACCATCACCAGTGTCATCACCACCACTCTTTGT
TTCTTGCGGGCAGAATAAAGAGTGCTAATGGCAGGGAGTTCCCGTGGCGCAGTGGTTAACGAATCTAACTAGGAACC
ATGAGATTGCAGGTTCGATCCCTGGGCTTGCTCAGCGGGTTAAGGATCCGCGTTGCTGTGAGCTGTGGTGTAGGTGG
CAGATGCAGCTCAGATCCCACATTGCTGTGGCTCTGGCGTAGGCCGGTGGCTACAGCTCCGATTTGACCCCTGTCCT
GGGAACCTCCATATGCCGTGGGAGCAGCCCAAGAAATGGTAAAAAGACAAAAAAAAAAAGAGTGCTAATGGCTAATC
CCAGTGCTGACACCCCCAAAGAAACAAGGCCACAATTCAGGATTTGGGGTCCACAGTCACCTGCTCTTTCTAATGAA
ACCTGCCACTCAACAAGTCTCACAAACCTAAACTTCCAACTTCCCTCAGTATCACTAATTGAAATTTCTCTTGCTCT
TTAGTTATTTTAGAGGCAACAGAGCATCATGTTTAAGCATATCAACTCTGACATCACATGTTTGGTGTCAAAATCTA
GCTTCACCAATTACAGACTGTGCGGCCTTGGGAAAGTTACTTAATTTCTTTGTGCCTATGTTTTCTCTTATGTGTAA
TAAGGGAAACAAATCCACTGTACAACAGCTGAGGAAACCCACACTTGTTGCTTAGAAAAGGTCTCCTATTCTTAGAT
TTGAACCAATGATGAAAACTCACAAGACCCATGAAGGGAACAATGACATGAAAAAAGCAAGACCAAGAAAAACTGAC
ACCTGAAGAAAAAGAAATAAAAGAACAGGAAAGGAGTTCTCATCTTGGAGCAGCAGAAATGAATCTGACTAGTGTAC
ATGAGGACGTGAGTTTGATCCCTGGCCTCGCTCAGTGGGTTAAGGATCCAGCGTTGCTGGGAGCTGTAGTGTTGGTC
ACAGATGCAGCTTGGATCCTGCATTGCTGTGGCTGTGGTGTAGGCCAGCAGCTGTTGCTCTGATTCAACCTCTGGCC
TGGGAACTTCCATAAGCTGTGGGTGCAGCCCTAAAAAGAAAAGAAAGAAAGAAAGAAAGAAAAGAAATACCTTCCCT
GGTTTCCTCCTTCTATATAACCCCCGATCACACTATACGACAGCTTCTTTCATAGCTCTTATCACCCCTGGAATGCC
CCGTTTTATATATTCTTCGGAGCAGCATAGTTTAGGAATAAAACATACAGACTCTGGAACCAGGCTGGCTTTAAAAC
CCTGGCTCTACTCCCTTATTACATAAGTGGTCTTGGGCAAGTTATTCAATTTCTTTTACCTCATTTTTTTCTCCTTT
GTAAAATGGGACTGTTTCAGGACCCAATATCAGAGGAATTTAGTGAAGACTGAATATGTTCTCTATTTGAGGAACTT
AGAACAGTGCTAAGTGAGTGGTTGCTATTACCGTTAGTGGCTTCCTTTCTGCCTACCTCTTCCTGCTGGTAAGTCAG
CCTCACAGGGCAGGAACTTTGTCTGTTCACTGCTCTATCCTCAGTGCCTAGAACGGCAGCTGGTACACGGTGGGTGC
TCAGAAAATACATGCCAAATGAAGGACTATAAAGAAATTCTTTCTTGGCAGATGAATTCCCTGATTTTTATCAAAGC
TTTCCTGATGAAGATGTTTGCAGTGTCCAGTCTAGAATTATGATCTCTTGGCTGGATAGCCCAAGGCCCTCCCTTTT
CCCTGCAGCCTATATCCAGTGTAATCTTCCCCCGGACTCCCTAGTCAGCCTCATACTCACCCCAAAAGAGAAGGAAA
CTGAAGCTCCACATCTTGCTGTGTTTCTGTCATTCGAAGAGGAGAATCTTTTCTCTGTTCCCAGAGTTTTTAATAAC
AGAGGGTGTGGAGAGAGGGGAAGGGCAGAGCCAGCATTGCTCAATGCAACCAGAGCATCACAGCCCTTTTTGCTGAG
TTGCCACCACTCGGAAAGGACAGTGTAGCAAACCCCTAATTTTCTCCTTTCTCCACAGTGTAGAGAGGTTGGTCTGG
CTGGTGGGTCAGTGTGTGGATCCATCTCCCTCTCTCTCTCTCTCTTTCCTTCCTGCTGGATTCTTTCTTTCTTTTTT
TTTTTTTTTTAATTGCAGCATAGTTAATTTACAATGTATACACATATATATTCTTTTTCAGCCTTTCCATTACAGGT
TATTATAAGATACTGAGTATAATTTACTGTGCTATATAGTAGGTCCTTGTTGTTTATCTCTTTTATATACAGTAGTG
TGTATATGTTAATCCCAAACTCCTCATTTATCTCCCCCTTCCACTTTGTTCTTTCCCCACCAACATCTATCTCCCAT
TTCTCATCATCTTATTTTATTGCACCCAGTAATAAATGAGCTTCCACCATCTATCCCCAATGAAGCAAGAGCAAAAC
TCAAGGGTCCTTTCCCAGTTTTCCCCGTACAATAACCACCATAAACCTCAAGTACCAGGCACTGTGCTAAATATGTT
TCCAAGAAAATTTAATTTCATCGCCATGTCAGCATCATCAAGTAGGGATTCCTACCCCTACCTATCTCATTTAAAAA
TACAATAGAATGGAAATTGCAACTACCAACCCCAAGCTCCCTGTCAACTATTACATTTAGAATGGATGAGCTAAGCA
ATGGGGTCCTGGCTGCACAGCACAAGGAAATATGTCCAGTCTCTTGGAATAGAACATGACGGAAGACAGTATGAAAA
AAAGAATGTATATACATGTATGTTTGGGTCACTATGCTGTGCAGCAGAAATTGATACAACGCTGTAAATCAACTACA
CTCTAATAAAAAATAAAGAAAGAAAAGTTAAAAATAAAGATGCTAGAAACAAAAAAGAAAAAAGGAAACTGAGGCTT
GGAGAGAAGATGTGTCTTGTCCAAGACTACCTGGACTTGAGATTTGAATCCAGGACCCTCTGACCCCAAAGACTAGA
ACTTTCACCATTTTGTTTGCCTTCAGCTCCCCATAATATCTGATCACTGTCGGTGACACTCCCACTCCATCCCCCCT
CCCCAAGCCCAACCGAAGACACACATACACATGCAACTTCTCATAAACAGGGTGGCCTAGGAATATCTTAGTTAGGG
TCTCCCAGATGCAGAGGCTGAGACAAGGCGTCTAGTGAAAGCAGTTCATCAGGGAGGTGACCCCAAAAACGCTCCAG
CTGAGGATGGGAGAAGTGAGAGAAGGAAGGAAAAGAGCCCACAATGAATGTTATCCAGTAAGTTACCCAGTAAAAAA
CTGAAACTGAAACAGAGGTTGAGGACATCTGTGCTATGTAGTAGGTCCTTGTTGTTTCTCTCGTTTATATGTAATTG
TGTGTATATGTTAATCCCAAACTACCTAAGAGACAGCCTAAAGCACCCTCTTCAGACTTATCCCAAACGAGGCGGGT
GAGGGAGCTGGGGTATTTATCCACCAGATGCTGTCGGTCACTGATTGAGGCTTGTGTTAACTTAAGACCTGGCCTCC
AAGCAGATAGAATGCGCTCCAGACCATAGCCCTGTTGATGACAAAATGCAGTGGCTGGCAGATGTCAGGCTAGGGCA
CCCAAATCCTGTGCTCCAAGATAAAACAGAAGGGCAAAGCCCAGCCCTGAGGTCTTGGGAAGAAGAGCCCCATTTGT
TTTCATATTCTCCTTTTTCGCTCTGGGCAAGGCAAAATACCTACCCTGGAATTATGGTCACCGAAGAAGATTCATCA
ACAGCTCCATCTGTGGATCAAGAGACCCTATCCAGTGAAGCTGCAGCTAAGAACGAGCACGAAAATACAGCAAAGCC
CTCCAAGAAGGAGGATAAACAGAGCTGTGTTACATTTAAGAGACACACTGGTGGATCAACACAGACCCTAGCACCAG
ATCGCAGGGGATTTAAATCCCGACTCCACCACTTGCTAGTCATATGCGGTCCTGGGCAACTTCTTAATGTCTCTATG
CCTCAACATTCCCATCTGTAAAATGGGGCTGATAAAAGGAGAATCTATTTCATGGAGTTAAGATGAGCATCAGAGGA
GTGGGTATATATCTCACGCTTAGAACCAAGCCTGGCACATAGAGAAAACTCCAAGATGTGGCTATTACTCAAATTCT
TTGATATTTCTCCCTTCCAGAGGGGGAACCCAGTTTTTCTCTCCTTGAATATGAGCTGGACTCAGTGACTTGCTTCC
AAGGAACAGGAAAAGGAAGATGTGACGTGTGGCCTCTGAAACATCTGAAAGTCATTGTGGCTTCCCCCTCGCTCTTA
CTTTCCAGGATCATTCAGTTGGGGGAAGCTAGTTATCGTATTGTGAGTTCACTCAAGCAGCGTGATAGAGAAGCCCT
CATGAGGAGGAACTGAGATTCCAGCCAAAACCTTGACTGTGACCTCATAAGACACTCTGATCCAGCCCCACCCAGCT
AAGCCACCTCTAGATTCCTGACCCTCAGAAACTGTAAGAAAATAAAAGTTTGTTGTTTGAAGCTGTTACATTTGGAG
GAGAGATGTGTTACACTGCAGGAGATAACTGATACGCTTAGAACCAATTGTCCTTGTCAATTAAAAAAAGGATAACA
ATAACATCATAAGAGTTTGAGGTTTGCTGGAATAAAACCTTAAAGTTCTACCTGGCAAAATAATGCCCACTAATATC
AGTAATTCTTGTTATTATTATTATCCCATTAGGCTAAGTGGTCACAGCTACTCATTGGCATCTGTTCCTGGGTACCA
GCAAGGACAGAAGTCAGCAACCCATTTCATGCAAGACCATCTAATGTGGGTGAGAAAGTTTAGACTTTCTCTGCTGG
GCAATAAAGGGATTTCAGCAAAGGAGTAACCATCCTGTTGGTAGTTTACAACACTCGTGTTGTGTAGACAGGATGTG
GTCATGGGTGGGGAGATGGGGAGAAGAACATAGCGACAAGCTCGTCTAGGGCACGGGTTGTGGAGACAGAGAGGAAT
TTAGGAAGCAGGAAAAGCAGAATGGGGGGAATGCATGCATGTGGGTGGGGGAGTCTAAAGCAGAAGGAGGAATTGAC
CTCTGGACATTGGGCTACAGAATTGAAAGTTCTTCCCATCCGGCCCAGGCTCCTTCTCGGGGTGGGATGGGATGGGA
TGAAATGGTGGAGGAGTTTTCCCGCTACTGCCAAAACAAATCGCCACAAACATATGGCTTGAAACAATACAAATGCA
ATACACGACAGGTCGGGAGGTCAGGGTCCCCGATGAGTCTTAGGAGGCTGAAATCAAGATATCCATGGGGGCTCCTA
GAGGCTCTGGGGAGAAGTCCATTCCCTGTCTTTGACAGCTTCTGGAGGATGCCCATATTCCTTCGCATTCCAAAGCC
CCTTCCTCCATCTGCACAGGCGGTGTAGTATCTCAAAATCTCTCTCCTCTCCCTCTCTCTCTCCTTCTCCCTCTTTC
TCCCTCTCTTTCACTCTCTCTCCCTTCCTCCCTCCTTCCCTCTCTCCCTCTCTTTCTCTCCCTCCCTCCCTCCTCTC
CCTCTCTCACACATACACACATACAAACACACACACATTTGCTCCATGGATGGATGGATGGATAGGTAGGTGGATTG
GTGGGTGGGTAAGATATAGATGGATCAATGGATGAATAAACAGGTAAGTAGATGTGTGTATTATGCTTTGATAGAGA
GAGAGAGAGATTGCTCTCATTCTCTAGATACATTTCTCTCATTCTCTCTATCCTCAATTTCTCTCTCTCCCCCACCT
CTCCCTCCCCTTTCCTCTCTGACCCTCCCTCCGCTCCCTTAAAAGGACTTTGTGATTCCATTAGACCTACTCAGATA
ATCCGCAATAATCTCCTATCTCAAAATCTTTAACTTCACTGCACTTGCAAAGCCCCCTTGGCAGTGTAAGGTATATA
TGTACAGCTTTCCAGGAGTGGGATATGGACAACCTGGTGGGAATTAGGGGGAATTTCATTATTCTACCTACTGAAGG
TGGGGTCTGGGGTCCTGGTGCGTGACTGAGGATGGCAAGATGCCAGTCACCCTTCAAATCCAAAAGAGGTGACCAAG
GCTATGAACTCTGGACCACAGAGATCCTCCAGGATGAGGGCAGGTAGCAGGCGTGAGGGGAGAAAAAAGGGAAGGAA
ATGCACAATTGGAGCCACATGGCTTGCAGAAGCCTAACCCCTTGTGACTTTCCCAGCAAAGAGGAAATTGAGAGATA
CTCAAGAAGTCATCTGAGGGTGTAATAGGAAAGAACAAATCTGACTCCATATTAGACCTGTTCCTTTTACTTTAACC
TTTGTGTCCTGTTGTTTTCCCTGAAAGAATGTTACCTAGAGCCTGAAATTCATCCCCCAGCCTGCATAGTCTCAAGC
CTCTGACCTTTAAGAGTATAACACGTTTCCATTCACATAGAGATAAAAAGTTGCAGAACAGAGAATTACATTTGTTT
TGTTGGAACCTTACAGGAACATCGGTGACCTGACCTATGCAGACAAAGGACTCCTGTACCAAGAAGGCTGCGACAAC
CAACCTGCCCTGCCCCACTTCCCCTGGCCTTTAAAAATGCTCTGCTGGGTATTCCCATTGTGGCTCAGTGGTAGCAA
ACGTAACTAGTATCCTTGAGGACTCTGGGGTTCGATCCCCCAGGCCTCACTTAGTGTGTTAAAGGATCCAGCGTTGC
TGTGAGCTGTGGGATAGGTTGCAGATGCAGCTCAGATCCTGCGTTGTTGTGGCAAAGGCTGGCTGCTATAGCTTGGA
TTCAACTCCTAGCCTGGGAACTTCCATGTGCCCTGGGTTCCGCCTGTGGAAAGTAACATAATGTCTTTTCTATCAAA
GGAAATCTTGGTTACTCCATTTTGCTCAGGTTTCACCTTCCTGCGACCCCCCCCACCCCTCCCCTTTCCCTCTTCTC
CCAATAACAATTTGTTTCAAATTAGCCAGCCGGGAAGAATGTGCACCCTGACCTGACCAATGGGAAGGGGACAGGTA
CATCACCTGCGTTAGGGATAAATAGGGGAGGGTCCTTTGTTCGGGGCGCACACTTTTTGGAGTGGCTGTGCCCTTCT
GCAGAAGTAAAGAGCCTTGTCGAGATTTCTCCTTGTCCATGTGTCTCACTTTCTGACACTGACGACCCAGCCCGAGC
TAGAGTTATTGGAATTTCCAACAGGCCTTAAAAAAAAAAAAAAAAAAAAAAAAAAAGACAATAAACATGCTTTGCTG
AAACCCTTTGGGAAGTTCCGGGTTTGGCAGTGGCGGGGGGAGGTGCATGAGGGCCCTTCCCCTCCAGCCCCCGCCCA
AGTCTCCTTGCACAGCCCTGCAATAAACCTCTCTCTGCTCCCAACTCCCCTGTTTTGTATAGTTTGGCCGCACTGAG
CAACAGGCACATGATCTGAGTTCGGTAACAGAGAAGCCCGGCCCCAGAGCATCCCTGGGTTCATGCTTAATGAGGGT
GTTGGAGGAAGGGCGGCTCCTGGGAAGCCCTCCCTACCCAACTGGACCGTGTTCCTCTCTCGTTCCCTCTAAACCCT
CCCCTGGCTCCCTGTGACCTTCGGGATGAAGTCCAGTCTCATTAATACGACACTCAAGACCTCACTGAGTCTTATAC
TGGTGCCCTTCTTCCTTATTGCCCCCCCTCACAAGTCCCAGTCATCCCAAATGAACCTGCAGTGCACACTGTCGCTG
ACCTGTCCAGCCATCCTTCAGCTACTGGAGCACCATCCCCCCGCTGCTGCGGGTGTTGCCTGCTAACAGTTCACAGC
TTCCCCTTCTCCAGAGAACGTTCCAGTTCAATGCCTGCATAAACCCTCAGGCCCATCCTGCAGCCAATAAGCAATGG
GCACAGGGGTCAAAAGCCAGCGTTCACCCCAAGGTGACTTCAACTTAGTGGTGTTATTCAGGCTCCGGGTGTTGGAA
ATTACAGTAACTCTGGCTCCGGTTGTCAGTGTTGGAAAGTGAGACACATGGACAAGGAGAAATCTCGACAAGGCTCT
TTACTTCTGCAGAAGGGCACAGCCACTCCAAAAAGTGTGCGCCCCGAACAAAGGACCCTCCCCTATTTATCCCTAAC
GCAGGTGATGTACCTGTCCCCTTCCCATTGGTCAGGTCAGGGTGCACATTCTTCCCGGCTGGCTAATTTGAAACAAA
TTGTTATTGGGAGAAGAGGGAAAGGGGAGGGGTGGGGGGGGTCGCAGGAAGGTGAAACCTGAGCAAAATGGAGTAAC
CAAGATTTCCTTTGATAGAAAAGACATTATGTTACTTTCCACACTACCCTTCCTCATCCTCTGCTAAATGTCCTCTC
TCAATAAACCCTGAAACAAACATCCTCAGGGCAGAGTCTGTTTCCAGGGGGACCTAAGAATCCCTCCCAGCCATTAA
ACTCTAAGCTGTCTCTTGACCTCAGGTTGCACATGGGTACTCACTCCATATTGTAGGCTTCCTTCCCATGTCAATAT
CACCTCCTCTTCCGTGCCTTCCTTTGTCAATCTCACCGCCTCTAGGAAGCCTTCCCACAAAAATATCACCTCCCCCA
GGGAGCCTTCCCATGTAAAATCACCTCCTCCAGGAAGCCTTCCCATAGAAATATCACCTCCAGAAAGCCCTCCCTGA
CCTCTCCTTCAGGATTAGGGACTTCTTCTATGCTTTCCTAATCCCAACACTTAATATGATCTTTGCTTGTTTCTGGA
TTTGGGGGTGGGGGTATGCTTGCTTTTGGTTTTTTCTGGGGTTTTTGGCCGCACCTGCTGCATACGGAAGTTCTCAA
GCTAGGGGTCAAATCAGGGCTGCAGCTGTCAGCCTACACCACAGCCACAGCAACGCCAGATCCGAGCCACATCTGCG
ACCTACACCACAGCTCATGGCAACACCAGATCCTTAACCCACTGAACGAGGCCAGGGATTGAACCTGCAGCCTCATG
GATGCTAGTTGGATTTGTTTCCTCTGGGCCACAACAGGAACTCCTGAAAAAACTAAAAATCTTAAAAAAAAAAAAAA
AGAAAGAAAGAAAGAACCAATGAGGAAAAAGAAGAAGGAACTGAAGAATCTCCTGACATCCCCCCCTAAGCCCTCAG
AACCAAGACCAAGAATGTAAGGGGATGGCCGATGGGCAGCCACTGCCCTCCCCCTGGAAGGAAGGAACACGAGTTCT
GCAAGGGGCAGCACTTGCTGAGGGGCAGAGTCCCAGCTTGCTGGGAAGGATGCATAGTTATCCAGGCTCCTAAGACC
CCTGGCAAGTGGAGAGGGGGGGTTGTTGAAATTCCCCTAGAACCACACCCAGGTCAAAGATTCCCCAGGATGGCTAC
ACAACTCAGTGCATAGCCATCCTCAGGCTGCTTTATTACAGCGAAAAGATACAAAGCAAAGACACAGAGGAAACCAA
AAATGAGGAAAGGGTTGAAATACATACAAGCTTCCAGCGGAGAGGTTCCCAGGAGAATGGAAGAAGCAGCCCCCATC
CATCAATTCCTTTTGCTGCGCTGATCTCGGTATGAGACTCCGACCCCAACCATCCTCTCCCGTTGTGTGATTTTTTT
CCTTTCCCCTATAATTTTCCCTGCCATGCCACCCCTCCCCCAAATTGTGTGACCTTCCTTTCATTGTCCTTGCCACA
AGTTCCCACCATGACCCTTTACAAGAGTAACATCTCAGGCGTTCCCGTCGTGGCTCAGTGGCTAACGAATCCGACTA
GGAACCATGAGGTTGAGGGTTTGATCCCTGGTCTTGCCCAGTGGGTTAAGGATCCGGCGTTGCCGTGAACTGTGGTG
TAGGTTGCAGACGCAGCTCAGATCCTGCGTTGCTGTGGCTGTGGTGTAGGCTGGCGGCTATAGCTCCGATGCAACCC
TTAGCCTAGGAACCTCCATATGCCGCGGGAGCAGCCCTGAAATGACAAAAAGAAAAACACTAAAGTCTCCTCACAGT
TGGAGCTGCTACTCTCTTGAGCTCAGCCCTTTGGTTCCGGAGGCCCTAATAAATCTCTCTTCTTGACTGACTTGGCC
TTGGGCGTTCTTCCTTCGAGCAAACCTAACACCAGGGTGGCCTGGAACCAGAGGGGCAGGGCGGGAGGGATCACAAG
AGAGCTCCAGAAAATTTAGGGAAACAATGGAAATGTTCCGTATCTTGAGTGTGGCCAAGGTTGCCAAACTCATCCAA
TTTTTACACTGAGAAACGAAGCAGTTTGTTGTATGTAAGTCACCCTCTCGTAAAATGGATAAGCTTGGCTCCAAAAT
AAAAGAGGACCCAGCATTCCATCAAATTATTTTCTTGTGCGTGCCACATGAAAGGACCCAGTTGTGTTATTGTGCAG
GCAATATATAAAGGGACCAGTTTATTTTATGCTATATAAAAGGGAACAAAAGATGGGCATTTTGAGTTTCTCCAGGG
AGGTGTGGGCTCTTTTACATTTAAACATTTGGGTTTTTTCGTTTTGTTTTTTTTTTTTTTTTGCTTTTCAGGGCCAC
ACCGGCGGCATATGGAGGTTCCCAGGCTAGGGGTTATTTCAGAGCTACAGCTGCCAGCCTACACCACAGCCACAGCA
ACACCAGATCCGAGCCGCATCTGCGATCTACACCCGACAGCTCACAGCAACACTGGATCCTTAACCCACTGAGTGAG
GCCAGGGATTGAACCCACGACCTCATGTTTCCTAGTCGGATTCGTTTCCACTGCACCATGATGGGAACTCCTAAACA
TTTGTTTAAATGGATAGCTTATCTTATTCCACAATAATAAATACATTTGACCTTAAGAAGCTTAGGAATGATCTAAA
TCTATACTTCCTTCAAATTAAAATGAAACCAAAAAAAAAAAAAAAAACTAGTACAGTTCACATTTCCTAACTGCACC
CTGACAGATAAGAAATGTTTCTTAGAATAATGCCATTTGCAGCAATATGGGTGGACCTAGAGATTATCATACTAAGT
GAAGTTAGTCAGAGAAAAACAAATGTCATATGATATCACTTGTGGAATCTCAAAAAATGATACAGAAAATTCCTTCG
TGATTCAGCAGGTTAAGGACCCAGCATTGCCACAGCTCTGGCATGGGTTTGAACCCTAGCCCGGCGAACTCTGCATG
CTGTAGTTGCTGCAAAAAAAAAAAAAAAAAAAAAAAAAAAATTAATTAAAAGAATATTTTAAATAAAGTGTTAAATG
ATATAAATTAACTTATTTACAAAGCAGAAATAGACTCACTGACATAGAAAACAAATTTATAGTTACCAAAGGGGATA
GTGGGGGTAGGGGGGAGATAAATTAGAAGTTTAAGGGTTAACATATACACATCACTATATATAAAATAGATCAGCAA
CGAAGACCTACTGTATAACTTAAACTATATTCAACATCTTGTCATAACCTATAATGGAACAGAATCTGAAAAAGGAT
ATATAAACATATTATATAAGTGAATCACTTTACTGTACACTTGAGACTAACACAACGTTGCAGATTAACTATACCTC
AATATTTTAATTTCACTCACATACCCTGCCCTGGGACTTACTAACTCTGACGAAGGCATCCACAGGTGATATTGGTG
GACATATTTCAAACACAGCCAGGCAGATATGGCATTGAATCAAACAGGGGCCTTTATAAACATCTCTTTCTCTCTTT
ATAAACATCTCTTTCTCTCTCTCTCTCCACCCCCCCAACACACTCTCAAACACGCGAGAGCGCTTTCCAACGCAGAT
AGCACCAAAGTAAAGCCAAGCTTGCCCTCTGGTGGACAGTATCAGTAGTGTCCCAAACTGCTGGGCTGATACTTGGA
TCCCAGCTTGGTGAAAGAAGTAGAGAGAGAGAGAGAAAGAGAGGGAGAGAGAGAAAGAAAGGTGTATCTGTGCACCT
GAGTTTGTTCACAAGCCTATATATATGAGCCCATATTTGGGCACCATAAAGGGCCCCTGATGCTTATGGCTTTGTAG
CATCCTCACACTGCCCAGTGGTATCTCCCATTCATTCACCCAAAAGCACAGAGAAGGGACTTATAGAGTCATTTCAG
AGTCTTGTTGGACACAAGCAGTCATAGCCTCATGTAGCCAGGATGGGGCAAGAGGTAGAAACACAGAGCTGGAGGAA
GCTAGAGGGAGAGTTTGGATCTAAGTCTCTGAAGGGTAAACATGGGCCTATACTGTTGCAAAGGCAGAGAAACCTAT
TGTAGATGGAGTGGGCTCTACTCAAAGCCTTTTACTGTAGCACAAAGCCTCTTCTTAATTCTTTAATCCCTTCCAGA
GGGCTAGGTTTGGGCTGTTGAGTTAGTACTTGGTATCTTCTAGAAGAGAAATGAGTGAGCCAAAGAAATGACTCTCT
AATGGTGGAATGACAATGAAGTCAGGCATAGGGCAGATTTTCTTTCTTTTTAAAAACAGTTTTTTGAGGTAAGACTG
AAACATACAAATTGTACATATTGAGTGTATACATAGCGATAAGTTTGGGGATACACATCCACTTGTGAGACCATCAC
CACCATCAAGGCCGTAAACATACCCATCACTTCTCAAAGTTTCCTTCTGCAGTGGATTTTCATTTTGGGGTCCCATC
ACATTTCATGGGGACTGTTGACTTGAGGAAAGTCTGTTCTCAGGGAGCCAGCACTCCTGTTTGAGTTGCGGGGGAGT
GTCTCAGGTCCCATGAAATATTTTCCCCGCTGCCTCCAAACTCATCAGTTTGAAGCTGTGTGCTGCTCTCTAGTGGC
CACCGCTCATTTGGCTCTAAGCTTTCCGCATAGATTGTTCTGGGACCAGACTGAAAGCGCAGGCTCCAAGTCAGGCT
TACAACTTTGAGCCTTAAATTGCAGGAGGTGGGGAGCCATGGATTAAGGAGACTTAATCAGTGGACAATTTGAGGTT
TTAATCAGTGTGGCCATTTCACACTTGACCTGGCAGATTTCCATTCATTAGTATCATCACTTGGTCTCCAGTCTCTC
CCATTTCCAATCTATTCTGCAAAAGCACAACCCAAGTCATATAGTCCAGGCAGCAGATTGAATCCTTAGGATGACCC
ACAGGGACTTATGTAATTTGCATCCTCCTCTTGATCTGGCTGCACTGACCTCTGGAAGCAGGAAAGGGCAGAAGAAA
AAGCTGAGCAAATATGCGGGCTCAGCTTGAGTTTACTTAGAATTAGTTTCATGGCGAAAATTAGTGTAGAGGAGCAA
GGTAGAGAGTATCTTGATGGTGGTGGGTGGTTATTATTGACTATGTGGTCAGAGAAGCCATCTTGGACATTTGAGCT
GAGACCTTGAGTGAATGGAGAGAGTGCCCAGGGAAAAGGGGGGAGGAGAAAATGTGTGTTAAGGCAGAGGGAATAGC
AGGTGCCAAGGCTCTGAGGAGGCTGTTGAGTCAGTACCCTGTATTTTCTGGAAGAGAAATTATTTAGCAAAAGAAAT
GACTCTCTAATAATGGAATTTTGGGCAATGAAGTGAGACAAGGAACAGATTTTCTTTTTCTGTTAAAAACCATTNNN
NNNNNNNNNNNNNNNNNNNNNNNNNNNNNNNNNNNNNNNNNNNNNNNNNNNNNNNNNNNNNNNNNNNNNNNNNNNNN
NNNNNNNNNNNNNNNNNNNNCCAGCCCGCCCCGGGCCCTGGGAGGGGAAGCCACCCGAACGCCTCAAACCTTTGCTC
TGGAAGCCCCAGGAATTTTTCCCCCTCTCCTAGCCGGGATATATGACCCCTCCTCTTTCTGGGGTGGTGGTAATCCT
GGGTTCCTGGGCGCCCTGGGGTAACTAGATAGCCCCTCGTGCCAACTCTGGGATTTCTTTTGGAGGTGCAGTGGAGT
CAGTGAGGGAAACCAAGTCACCCCTCGGGGGGGACCCGCGGAAGCATGGCGACCGGGAGAACCTGGTGCCTGCTCTC
TGGCCGTTCTGGGGGCCCCCCAAGCTGCGGGGAACCCTGTCCCTCTGGCCCTGACTCACGCCGGGCCGGCCGGATTT
TCCGGAATCTGGGGGGGATTAGGGGAGCCGGGGCAGGGGGAGTGGCCTTGCCCCATTCCACACCCCTGTTGGACGTC
TGGAGAGGGGACACTGTAGTCCGGCTGGGGCCCCGCCCCTGTTCCCTGGCCCTTCCTGGGAAGGGGAGGGGGTTCCC
GCCGGTTTCCTGCTTCCCCCCACCCCACGCCGCTCCGGGGCGGGGCCGGGAAGCCACTCCTTCTGGGAGCTCAGAGC
TTGGAGGCTCCCCTGGGCCAGGTCAGCGGGCTGTGGGGTCCCAAAGTCTTGATCCCGGTCCTCCCAATCCCCCGCTA
GGATCAGTTTGAGGTGCTTGAGCGGCACACGCAATGGGGTCTGGACCTGTTGGACAGATATGTGAAGTTCGTGAAAG
AGCGGACGGAGGTGGAGCAGGCTTATGCAAAGCAGCTGCGGTGAGACCCTAGGGTGGCCGCGCCCTGGGCTTCGGGG
GAGCGGTTGGAGGGCTGGGGGCTCAGTCTTCCTGCCTCTCTCCGTAGGAGCCTGGTGAAAAAATATCTGCCCAAGAG
ACCTGCCAAAGATGACCCTGAATCCAAGTAAGAATGAAGAGGGGAGGCAGAGTTAGATTTGGGAGGACTGGGGTATT
GGATCCTTTTCCTCTCCCTCCATTTGGGCCACCCAAGCACTCCTGGCTTCTCCACCCAGTTCCACTTAGAGGTATGA
GCTGGGAACCAGGAACCGTATTACCTGGGTTGGAATTCAAAATCCACTACTTTCTAGCTGAACTGCTTTGGGCAGTT
GACTCCAGTTCTCCGCCTCCATTTTTCTTGCCTATTAAATGGGAGAGGCTCCAACAGTTATTAAATGAATGACTCTG
AGCAAGTGACTTAAGTTTTGTGCCTCTGTCTTCCTCACTGTGAACTGGGGATGATGATCACAATACTGATCATAATG
ATAATGACCTTGTAGGGGCTCATTTGAAGATTAAGATAATGTGTTAAAACAATGCCCAGCCCATTTCACTTTATTCC
AAGCCCCCAGTTCCAGAATCCCCAAAGCTCTAAGAATCAGAAGCTTTTCTGGGCACCTATCCAGAGGCAACCTCTGA
CCTGAACTAATTTGACATTAATTACATTAATTGCGTTCTTGGTTTTTATCCCACTGAGTGTGAATGTTAATACTTAT
CATTGAGAGTTCCCGTTGTGGCTCAGCAGGTTAAGAATCTGACTAGTATCCATGAGGATATGGGTCAGATCCCTGAC
CTTTCTCAGTGGGTTAAAGCCCTGTGTTGCCATGAGCTGTGGTGTAGGTCACAGATGGGGCTTGGATCCTGCATTGC
TCTGGCTGGGGTGTAAGGCCTGCAGCTGCAGCTCCAATTTGACCCCTAGCCTGGGAACTTCCATATGCCTCAGGTAC
AGCCCTAAAAAGAGAAGAAAAAAAATCTCATACAAAAATGTTTATTAGATGCTGCCACTAACACCACTAGGGTAATG
TGAAAAGTGATATAAGCATCATATCCCCCTTCTGAACCCCCCTCAAAATCCTGAGAATTCTGAGTTCCCCCTCAGCG
GGTGGGGATAAGGGAGATTGGTTAGAATTTATCATTGCTTCTGGGTGAATGTTTTGGAGCTTACACTCTTCTGGGGC
ATATGGCTTCCAAGGGCCCTGACCCCTAGCCCCTGCCCCCTTCCCCCCACCCCAGGTTCAGCCAGCAGCAGTCCTTT
GTGCAGCTTCTCCAGGAGGTGAATGATTTTGCAGGCCAGCGGGAGCTGGTGGCTGAGAACCTCAGTGTCCAAGTATG
TCTCGAGCTGGCCAAGTATTCGCAGGAGATGAAGCAGGAGAGAAAGATGGTAGGTGATGCCCTCCTTGGGACTTCCC
CAGGGCCCTGGCCACCAGGCTGAGCCTTATTACCCCCTTCTTTCTGTAGCACTTCCAAGAAGGCCGCCGGGCTCAGC
AGCAGCTGGAAAGTGGCTTCAAGCAGCTGGAGAATGTGAGTTTGTGCATGGGGAGAAGAGGGGCACCCCTGAGCAGT
GGGGTGAGGGTGGCTGATCCATGGAGGTACCCCCTTGGTCTGGCCTGGTCCCCCACCTTCATTGTGGGTTTCCCCCT
CCATGTGCTGGGTGACTTCCCACCTGTCCCTGAAACCTTAGTTGGTGGCTCCTTCATGCCGGTCCTGTCCTCTACAC
AGAGTAAGCGTAAATTTGAGCGGGACTGCCGGGAGGCAGAGAAGGCAGCCCAGACAGCTGAGCGGCTGGACCAAGAT
ATCAACGCCACCAAGGCTGATGTGGAAAAGGTGCTTGTGCGGTCTGAGGCAGGCTTGGGGGGGGGGGGGGGCAGGGC
CCGAACCTGGCAGTGACCCCTGCTTTCATATTCCTCAGGCCAAGCAACAAGCCCACCTTCGGAGTCACATGGCAAAA
GAAAGCAAAAATGAGTATGCGGCCCAACTCCAGCGCTTCAACCGAGACCAGGCTCACTTCTATTTTTCCCAAATGCC
CCAAATATTCGATGTGAGTATTCAAAACCCACAGCCCCACCTCCTCCCCAAATTCTAAAATTAACCAACTCCTACAC
ATTTGTTGAAACCCCAGCTGCAATGCCCTAATCTCTAAATTGAAAGAGAATTAGAAATGAAGAGTCACAGTGCACTC
TGCCTTTTCTCAAGCTATTCGTTCTGCCCGGGTTGTCTTTCTTTCCTTTTAAAACTTCCATTTATTCTTTCAAGCCC
CATCAATTAACCCCTNNNNNNNNNNNNNNNNNNNNNNNNNNNNNNNNNNNNNNNNNNNNNNNNNNNNNNNNNNNNNN
NNNNNNNNNNNNNNNNNNNNNNNNNNNNNNNNNNNNNNTTCCTGCCTTCTTTGAAATCACCTCCGTTAACTATACCT
GACTCCCATGAGTGATTCTGCCATGCACATGTCCAATCTCTCTCTCTCCCCACAGTAGATAATCAATTCCAGGAGAA
CAAGTATTTGGGCCTGTATTTCTCACTGCTGCATCCTCCATCCCTAGAATCTGGGCGGGCATACAGTAGGTGCTCAA
CAAGTATTTTTGAATGAGTGCATGAATGAACGAAGAAATGAATGAATGATTATTGGCTTCAGCTTTGCAACTGAACT
CAGCTGAGACTCACTCGAACGCCTCTCCCACGAATGCTGTCTGTGAAAACAGATAGGACCTGATTCCCCCACAGACC
CCTGCACCTACCTCTACACATCTGTCCCGGGCCCTGGACACTCGTCTTTCCCCTGCTGGATTCAAATCCGGGCTTGC
AGACACAAGAGTAGCTCCCCACACTGTTTCGGCAAATCGCGTGCTCTGGGCAAGTTTTGGGATTGGCACATTCATTT
ACATCTAGTGAATGGGAATGAAAACCCGGGTCAAGGCAGAGGAAACAGTGAGGACAGGAAGCTGCGAACAGGACATT
CATCTCACCCACAAGGGTAGGAGCGAAGCATTCGAGGGACGGAACCCCCGTTACCCTCAATTACTGCCTTATCTACT
GCTTAGCTCCTAATAGACCCTCAACAAGAATTCAAATCCAAGTTTCTCTACTTGATAGTTATCTATCCTTATGCAAG
GGACTGTACCTCTCTGGGCCTCAATTTAATCATTTCTAAAATCAAGATCATAGACGCTACCCATAAGATCATCACAT
ATTACCTGTACAGATGAAACGACCTTTCTTTCCCAAGATCCAGTTGTTTCCAGTGGGAGATGAGAAACCAGTCAAAC
AGCTGCACCTGTACCTCCCTGGCAGGTCTTGCAGATTGAGTGAGGACCACATACTGGGGGGCTTTGAGAACACTCAT
CTATATCTGGACAGGAAAAGAGAGTCATAGTTGCCAATATGCTCCTTCATGTACAACAGATTGTATTTTTCAAAGAG
CTTGAAACACTGTCTTCCATCCCATGTGACCTGCATGCAATGTCCTTTAACTGGTACACTTTCCATCAAGCAGTGGG
TCTATATTTCCTTCCCTTGAATCTGAGTATGGTGGTGGGGACATTAGGTCATCAAAATACCATGGTAAATCATCAAA
ATATCATACACTTCCACCTTGTTCTCTTGAGATGCTCATGCTTGGCTCAGCCGCCATACTGTGAGGAAGCCTTGCAA
GTCATGAAAAACCAGCTCACACGGTAAGATTAAGACTTCCCACTCACAGCCCTGGAGCAGCCAACCAATAGCCAGCA
CCATCTTGAAGCCACAGGAGTGAGCCCCCTTCAAAGAGAATCCTCTAGCCCCCAGTTGAGCCAACACAACTCACACT
GTGGGGAACAGAGTTGAGCCATTCTCACCCAACTCAGCCCAAATAGCAGATTTATTTGTGAGCAAAATAAATGATTG
TTGCTGTCTTAATGTACCAACACCAATAGATAACCAGAACTTTTGCAAACCCACTTCTAGGAATTTACTCATTGGCG
CACCCATAGAATTGTGCAGCCATTGTACCATGGGGTGGGCCTCCCCAAATCTCCTTCAGCCCTGCTCTGCCAAGTCA
TCCTAAGTAAACATTTGCTTTGAAGTTGCTGGACAAATACAACTTCAAGGCAAGCGCCCTATAGCTCTCTTCCAGGA
AAATGCACCTCTCCAAGAGAGAAATCTGGACCTGCCACATGCATCAAGATAAGATCACAGGGATATTCTTCCCAGTT
TTAAGTAATGGAACATTAAACATCTAAATGTCTGTTGATAATAGGATGATTAAATCAGGAGTTGACATAAAGAATAA
TGTAGCATGTTCCTTCATTTGAGAAATATCTATTGAATATTCACAGTGTCTTAGGTACCATATTGGGAGTCAAAGAC
ATGCAGTGGACAAGGTCCTTACCATAGTATCCATCATTTTCTAGTTGGGGCATGTTGATTCTACCTGTATTTTATTT
TATTTTTTGCTTTTTATGGCCACACCCACAGCATATGGAGGTTCCCAGGCTAGGGGTCGAATCAGAGCTACAGCTGC
TGGCCTACACCACAGCCACAGCAACGCCAGATCCAAGCCACGTCTGTGACCTACACCACAGCTCACGGCAACACTGG
ATCCTTCACCCACTGAGCAAGGCCAGGGATCAAACCCACAACCACATGGTTCCTAGTCATATAATTTCTGCTGTTCC
ATGACAGGAACTCCTGATCCTACCTGTATTTTAAAACGAGGGACCAAAAAGACTACTGTGCTCACTGAATAATCCAT
GAACGATAGCCCAAAGGTTTAAAAAAGGATGTTTGGAGCTCCCTAGGAAATATAGTAATAGATATTAAATCATCTTA
TTCAGAGATTATCAAACTACAGCCCAAGTGTGAAATCTGGCCCACTACTTGTTTGTGTAAATAAAGTTTTATTGGAA
CACAGCCACATCCATTCATTTATGCATTATCTCTGGATGCTTTTGCATTACAACTGGAGTGTTGAATAATCAAGACC
TCCATATCATATGGCCTGCAACCTCCAAAATGTTTACTATCTGGCCCCTTGCAGAAAAATTTTGCGGATCCCTGGTC
TTATTCAGAAACATAGTCAGATCTTCACTGTTAAAAGGAAGTTTGGGTCTAAATATAAGGAATACATATCAAAAACT
AGCTCATTCTGGGTATTATTTTAGCTTATATTCTTTATGTTAACTGTAGCTCTTGGCACTCTACATGTGCCAAGCAG
GTTGTATACATTATTGCATTTAATTTTCCCAACTATCATTTAAGGTAAATACTTCTTTCTCTCTCTCTCTCTCCCTC
TCGGCCACCCTGTGCCATATGGAGTTCCTTCGTCAGATCCCAGCCACAGTTGCAACTCGCACAGCAGCTGTGCCACA
CCAGATCCTTAACCCACTGTGCTGGGCTGGGGACTGAATTTGCATCCCAGCCCTGCAGAGACGCTGAAGATCCGGTT
GCACCACAGCAGAACCCCTAAGGTAGATACTCACATACACCCATTTTATAGATGGAAATATTGAGGCTTAGAGATAT
TAATGATGTTTCTGCAACGCTTTACAACTGCTGTGTGGCAAACAGGTAATGTGGTTTGGAGACCGCCATTAGAGTCG
GAAAGTCCCGGGTTTGCATTCCAATTTAACTGCATGACTCTGAACACATCACTTCAGATATCCAAGCCTCAGGCTTC
TCATCTGTACAATGGAGGTCCTAGCAATGCCTATGCTCAATGTCATGTGAACAGGCACATAAAGCCCTTCACACAGG
GCCTGGCACTCCGTACAGGTTAGGAATTCATATTATTCACATGGAAGGAAATCAATGTCTATTTGGGGATATTGGCA
AATAGCATCTTTTTCTTTTTTTTCTAATGCAAGTCTCTAATCGCAAGAATTTTTGCTGGCCAGGTATCATTTCTCAT
AATCAAAACGCGTTGTCCCGGGCTAAATGTCTGCACCAGACTGNNNNACCNNNNNNNNNNNNNNNNNNNNNNNNNNN
NNNNNNNNNNNNNNNNNNNNNNNNNNNNNNNNNNNNNNNNNNNNNNNNNNNNNNNNNNNNNNNNNNNNNNNNNAGAA
GCCGAGAGCCGGGTCCTAAGCAACCGAGGGGACACCCTGGGCCGGCACACTCGGCCCCCAGACCCCCCAGCCAGCGC
CCCGCCAGACAGCAGCAGCAGCAACAACGGATCACAGGATAACAAGGAGAGGTGAGCAGGGAGGCCAGAGTGTGTGT
CTGCATCCAGGCCCAGGAGTGATGGGGAGGGGTCCTGTCCTCACCGGCTTTGCCCTCTCCAACCAGCTCTGAAGAGC
CCCCTGCAGAGGAGGGTCAGGATGCTCCCATCTACACGGAGTTTGATGAGGATTTTGAAGAGGAGCCCGCATCGCCC
ATAGGCCACTGTGTGGCCATCTACCACTTTGAAGGTAAGGACAGCCTGGGTGGCGCATCGGTGGCTTCGGGGATAGC
ATTTTTGGCTAGGCTCTGTTTAGGTTCACCTTGAGCAGATCTGAGCCCACCGCCACCCCCACCCCATGACAGGGTCC
AGCGAGGGCACCATCTCCATGGCCGAGGGCGAGGACCTTAGTCTCATGGAAGAGGACAAAGGTGACGGCTGGACCCG
GGTCAGGCGGAAACAGGGAGGTGAGGGCTATGTGCCCACCTCCTACCTCCGTGTCACGCTCAACTGAACCCTGCCAG
AGGCGGGAAGAGGGGGGGCTGTTGGCTGCTGCTTCTGGGCCACGGGGGGCCCCAGGACCTACGCACTTTATTTCTGC
CCCCGTGGCTTCGGCTGAGACCTGTGTAACCTGCTGCCCTCCCCCCCACCCTGCCCCGGAGCCCCCACTCAAGGGAC
CCACTGTGCCTTCCACCATCGATGTACATACTCATGTTTCCCATCTTTTCTTCCTGCCACTCGGCTGGGGCCGTTTT
GTTTTATATAAAACAATTATGAAAAGCTCTTACAGTCTGTGTCCTATTACGAGATTCTGATACTGGGGCTGGAGATT
CAAACACCACCCTCCCGACAGGTGGCACCAGGAAGGAGGAAGGGAAGGCGAACTTGGGCACACGTTGGCATCCCCTG
TCCCTTCCTGGGGGGTTGGGTGTGTTGATAGGGAGGAGGGTGCCAGATGTCACCCCTTTGGTGTTCTGCTATAGCTC
ACTGAGAACAGGTCACACCTGTTGAGCCCCTACTGTGTGCCAGGCATTTTCCACCCATGATCTCATTCAAACGCTGA
GCTTTAATCCCCATGACAACCCCTGGAAAGTACACAGTCTCACTTTTATGTTGAAGGCGGGGATAGAGAGAGAGGTC
AAGTGATCTGCTGGAAGTCACACAGCATTTAAAATGGATTTAAACTCTGGCCTCTTACAGATCTGCGAGTTCTCTTT
AACATTCAAAGCCTCACATTCACCACTTGTGGGATATGTTGAGGGGGGTGTGGGCATGGGGTGGTGAGAAAGGGCGT
TCAGAACCTCCAGATGTCGGGTCTTCTCATATGGGGAAGTAGGCTGCCCTCCCTTAGGATTCGTGCTCAGTTTTAGG
GTGCAGGGTGCGTTCTTGCAAACCAGGACCCGTCCCTTCTGTGAGGCTGGGTGCAGGTCCCACTGCATTTGGCTGCC
TGAGGACACTGGGGATCCCTGGAAGACTGGGTATCGCCGCGTGAAGAAGTGGATCTGTGCTTTCAAAGGTCAGGCTC
CAGGCGCTGCGACAGGACACTGAGGACGTGCTGGAACTTGTCGAAACGTGTGACCCACGGTGCCCCAGCCCCTCTGC
TTCCCCAGAGCAGCCTCCGCAAGAAACCGGTGGTCAGGGCCTCTTTCAGCTCAGGGTTGGGCTGGAATCCTGGGGGC
GGAGCCAGGTTAGCTGGAGGCGTGGCCAGGCACCTGCCTTACCCTCTGATAACTGCCTGGTCCCCTTGGGACTTTGA
CCCAGCAGGGGCCAGGAGGGATTCTGTCCCAGGTTATCTGAACTGCTGGGCAAGGTTAGCGGGGAGGGGGCTCCTGG
GTCTCTGCAGGGAGTGGGGTGGGGGTGGCTAACGGGCCCAGTGGAAGCGGGCTCTGCCAGGAGTGCATGGGAGCAGT
CTGCTCCAGGTGCAAGACCTGGTGGCCCCACCTTAGGGCTTGTGCCTGGAGATGGAGCTGCCCCGGGGGGCGGGACT
TGGGGTCCAGGCTACCCTACGCGACAAACGCCCAGGGGGTGGGGGTGGAGTTGGGCCTAGTTGGAGGGAGAAGAGTG
CTAAGTGAAGGCAGGAACTACCCAGGTGGGAGATTCTGGAAGCTGGGCTGCCCCAGAGAGGTGTGGCTCTGAGCTCA
GAGGGAGAGCAGTACCATCAGGTTGAAGGACTGAATCATTTTGGGGGGATCGAGATCCTCTGGGGGCAGGACCTTCC
CAAGTGTGAGAGAGTGGGACTCTGCGGGCGTGGCTCTGGGGGGATAGGGCCGCCCTTTAGGGGCGGACGGCACCATC
TGGTCTATTGCAGCATGCTTGAGTCGAGAAACACCCACCCAGGGCGGGGCCGTCTCAATTTGGGTGGGGCCCTCAGT
TTGGGAGGTGTAGCGGGAGGCTCTAGTCCCTGGGCCGGTGGGTTTGGGGGTGCCGGGCTACAGCATACGGCGTGTTC
TTAAAGTCAGGATCCTCTGGCAGCCGGGCGCAGATGGGGCGCTCACCTCGCAGGCGCCGGGCTGTCGCCTCGCGGAA
TCTGGGCGCGTCCCGGGCCGTCTGACGCGCCCGGTCCAGGGTGCGCAGCAGCCGCTCGCAGCTCTCGTCCAAGGGCC
CCGGGACTTCCTCGCCCTCCAGCAGGCGCACCACGGGTGCCACGTGCGGCAGCGCCACCTCGCCCGGGTCGCAAGGT
CCTGTTGGGGTAAGGGTCTGGGCTGGGCTAGGGGCAGAGGGTGGGTCCTAGGGTGAAGAGGGTGCGCCATACATTGG
GCCGAAACACCCTAGGACAAAAGCAAGGGGTGGAGTTTGGGTCAGATACGAAGTCTTGAGCAGGACCGAGTCAGGGG
AGGGGCCCAGGGAAGGGGCGGAGCCTAGGAGATAGTGAGGGCGGGGCCTAGGGATCTGGTCCTGGACCTAGCTTCGC
ACAGAGGGCGGGGGCTAGGGCGAGGGGGCGGGGCCTTGGACCCAAACAGCCAGCTGAATGTAGGGCGGAGGTGGAGC
AAAGGACAGAAACAAGGGGTGGATTTTGGTTGGAAAGAGACCCAGAGGCCAGAGAGCCTAGCAAAGAGCTGGATGGG
AGACAGGGACCAGGCCTAAGGCGCGGAGTGGGGTACTAAAACCCCCGCGGGGCTTAGAACCGGATTGAGGTCCTGAT
TAGAGTTACCACTTATCTAAAGATGCCACTCACCGGTGCCCTCATCCAGCGTCCGCATTAGAGGCTTCAGCTCCTGC
TCGAAGGCCAGCGCAGCCTCCGTGTGGCTCCTCCGGAGCTGGCGCCACGTGCGTTCCAACCGCGACACCTGGAAGAA
GAGACCCGAGCCCGCCTTCTCTCCACTCTTCCCCTTCACTTGCTCTCTGGCCTCGTCCCGCATCCCTGCTTCCTACG
CACCTGGGGCATGAGCAAGGCGCCCATGACCGCAGCCAGTCCAGGCAGGTCCCCCGCCGCCCCTGGCCGCAGCGCCA
GAGCCAGCTCCACCAGGCCCTTCAGGGCGGCGGCGCGCTCCTCCAGCGGTCCCGCGCAGCCCAGCACTGCCAGCGCC
CCCGCCAACGCCAGCGTCTCGAGCCTGCAGAGGCGGAGGGCAAGGTTTTGGAGGCAGTGGCGGGGTTTGCGATGTGG
GGGTGAGGAGGGAGAGCAGGTGACACAGCTCATCTCCCCTCCTCCCTGGGGGGCCGTGAATGGGGGGGAGGTTGAGG
ACCCTAGGGATTTTAGGTGGCTGCCTTACCTCTCCAGCAGTTCCAACCTCAGGCGATGTCCATGGGGAAGAGTGAGC
AGCTCCAGACCAGAGGCAACCCCCATGGCGCCCCGCTGAGCCTTGGTCACCCCCAGGAGGCCTGTCTCCTGGCAGTG
GGGGAGGGGTAAGAGTAGGGAGTTCAGAGGAGCAGAATGAGTAAATGGGTATGAGGTGAGACTGGGCCATGCCCTGG
CTTCAGCCCTACCTGGTAGGGGACCCACCTGGCAGTCCACCAATAGCAGGTGGAGGGCAGTGCTCCCAGGATGGTGC
TCCAGGAACAGGCCACGGAGAATGCGCAGGGCTTTAGGTTCCAGAGGCCGATTCTGGGGGCCCAGCAGGCAGGAGGG
GTTGTCAGGGGGACAGAAAGAGACCTCACCCTGTGGTCTTGCAAAACATCTTTGCTCCTCCTCCTCTTCCTCTTCAT
TGGCCTCCCACCATGGTGCCTCTGGCTCTGGGCAGCTGTGGCCAGGGGGTGTTCCATGGACCCTAGGCACTCGGGGC
ACCAGCTCACAGTACGTTGGGGAGCGTCCAGAGGCATCAGGCAGCATCAGTGAAGGTGTTCGAGGTGGCTTGGTTGG
TGCCTTGGCATGAAGCTGCCCATCGGAGGCCCTCAGGTTGTCAGCAATGGACCCCAGGAGAGCTGGGGTCTTTAGCA
ACACAGGGTCACTTCCTGTCCGAGGCAATGCAGATGCGGGCACAGTGGAGGCTCCTGGGGGTCACACAAGAGAGGGT
AAAAGAGGTCCACAGAGAAAATAGCTGGTTGGGGCTTTGTGGGGTACCAACCTCCAGGTTCATTCACTCGTTCAGCC
AATAACCAGGTACCCCACCTAACCTGGCGCAGCTTTGGACTTGAACGACTTCACCAAAACTCCTCTAGCCCATATGG
AGTTTTGCAAATTCTGAATGCTAAATTTTAAATTTGAATTCTTTGTTCTTGCCCCTCGGTTCCTGCATTGCTATAGC
TGTGGCATAAGCCAGCAGCTACAGCTCTGATTCAGCCCCTAGCCTCGGAACCTCCATATGCCGTGGGTGTGGCCCTA
AAAAGCAAAAATAAATAAATAAATACTCCCGTCTCCATACTCCTTACTCTGTTCTACTTTAGTTTTTGCCCCAAAGC
ATACATAATTGACTAATTTTTGTTGTTCATGGTCCTTCTTCCTCTAAAAGGATGTTGGCTCCACCAGCGCAGGGATC
TGTGTCATTCTTGTTCATTGATGTTATCACAGCACTTCATACAGTCTCAGGCATGTCACGAGACTTTGGGTGGAGGG
CAGGGCTGACAAGGCAGTCAGGACACAAAGGGGACTCTTCCTTTATGTAGGATTATCAGGGTCGGCTGCTCTGATGA
ACTCATGTTAGATGAGAAGGAGTCAGTCAGGTAAAGGTAGGGAATGAGCTTTTTCCAGTGGTGAGAATAGCAAGTGC
AAAGGCCCTGAGGCCGGAACATATTCGGCAGGTTCCAGCAACTGTAAAAAAGACTGTGTGATTGACGTGAAGAGGGG
ATGTAGCAGGAGTTATTAGGTCAGCCATGGTTAGAGCATATAGGGCTCCTTGGAATAATAACAAACCCACATTTTAT
TTTCTTCTTCTTATTTTTGGCCACACCCACAGCATGCAGAAGTTCTGGGGCCAGGGATGGAACCTGTGCCACAGCAG
AGACCTGAGCCGCAGCAGTGACAATGCCAGATCCTTAACTTGAGCCAATAGGGAACTCTGGAACTCCATAAACACAT
ATTTTTTTTTAAATTTTTTTACAAAGTTCCTGTGTGTTTTTAAATTACTGTGACAACATGAAGAGTATTACCATCCC
TTTTTTCCAAAAGGTTAAGTCCCCTGCCCAAGGTTCCTTAGGTATAGCCTGGCAGAGCCGTCCCTGAGCTCTGTGCT
GCCTGGGAAGCCCCTTACCTGGTCCAGGGTGGTCTTCTGTTGGGTGCCCCACATGCTCC

| | |
|---|---|
| SEQ ID NO: 27 | C3 cDNA Sequence |

CTCACTTCCCCCCCCACCCCCGTCCTTTCCCTCTGTCCCTTTGTCCCTCCACCGTCCCTCCATCATGGGGTCCACCT
CGGGTCCCAGGCTGCTGCTGCTGCTCCTGACCAGCCTCCCCCTAGCCCTGGGGGATCCCATTTACACCATAATCACC
CCCAACGTCCTGCGTCTGGAGAGTGAGGAGATGGTGGTGTTGGAGGCCCACGAAGGGCAAGGGGATATTCGGGTTTC
GGTCACCGTCCATGACTTCCCGGCCAAGAGACAGGTGCTGTCCAGCGAGACCACGACGCTGAACAACGCCAACAACT
ACCTGAGCACCGTCAACATCAAGATCCCGGCCAGCAAGGAGTTCAAATCAGAGAAGGGGCACAAGTTCGTGACCGTT
CAGGCGCTCTTTGGGAACGTCCAGGTGGAGAAGGTGGTGCTGGTCAGCCTTCAGAGCGGGTACCTCTTCATCCAGAC
GGACAAGACTATCTACACCCCAGGCTCCACGGTCCTCTATCGGATCTTCACCGTTGACCACAAGCTGCTGCCCGTGG
GCCAGACCATTGTCGTCACCATTGAGACACCTGAAGGCATTGACATCAAACGGGACTCCCTGTCATCCCACAACCAG
TTTGGCATCTTGGCTTTGTCTTGGAACATCCCAGAGCTGGTCAACATGGGGCAGTGGAAGATCCGAGCCCACTATGA
GGATGCTCCCCAGCAAGTCTTCTCTGCTGAGTTTGAGGTGAAGGAATATGTGCTGCCCAGTTTTGAGGTCCAAGTGG
AGCCTTCAGAGAAATTCTACTACATCGATGACCCAAATGGCCTAACTGTCAACATCATTGCCAGGTTCTTGTACGGG
GAGAGTGTGGATGGAACAGCTTTCGTCATCTTTGGGGTCCAGGACGGTGACCAGAGGATTTCATTGTCTCAGTCCCT
CACCCGTGTTCCGATCATTGATGGGACGGGGGAAGCCACGCTGAGCCAAGGGGTCTTGCTGAATGGAGTACATTATT
CCAGTGTCAATGACTTGGTGGGAAAATCCATATATGTATCTGTCACTGTCATTCTGAACTCAGGCAGCGACATGGTG
GAGGCAGAGCGCACCGGGATCCCCATCGTGACCTCCCCCTATCAGATCCACTTCACCAAGACCCCCAAGTTCTTCAA
ACCCGCCATGCCCTTCGACCTCATGGTGTATGTGACGAACCCCGACGGCTCCCCTGCCCGCCACATCCCGGTGGTGA
CTGAGGACTTCAAAGTGAGGTCCTTAACCCAGGAGGACGGTGTTGCCAAACTGAGCATCAACACACCCGACAACCGG
AATTCCCTGCCCATCACCGTACGCACTGAGAAGGACGGTATCCCAGCTGCACGGCAAGCGTCCAAGACCATGCACGT
CCTACCCTACAACACCCAGGGTAACTCCAAGAACTACCTCCACCTCTCGTTGCCCCGCGTGGAGCTCAAGCCAGGGG
AGAATCTCAATGTTAACTTCCACCTGCGCACGGACCCCGGCTACCAAGACAAGATCCGATACTTTACCTACCTGATC
ATGAACAAGGGCAAGCTGTTGAAGGTGGGACGCCAGCCGCGCGAGTCTGGCCAGGTCGTGGTGGTGCTGCCCTTGAC
CATCACGACGGACTTCATCCCTTCCTTCCGCCTGGTGGCTTATTACACCCTGATTGCTGCCAATGGCCAGAGGGAGG
TGGTGGCCGATTCCGTATGGGTGGATGTCAAGGACTCATGTGTGGGCACGCTGGTGGTAAAAGGTGGCGGGAAGCAA
GACAAGCAGCATCGGCCTGGGCAACAGATGACCCTGGAGATCCAGGGTGAGCGAGGGGCCCGAGTGGGGCTGGTGGC
CGTGGACAAGGGCGTGTTTGTGCTGAATAAGAAAAACAAATTGACCCAGCGTAGGATCTGGGATGTCGTGGAGAAGG
CAGACATTGGTTGCACACCAGGCAGTGGAAAGGACTTTGCCGGCGTCTTCACAGATGCAGGGCTGGCCTTCAAGAGC
AGCAAGGGCCTACAGACTCCCCAGAGGGCAGATCTTGAGTGTCCGAAACCAGCCGCCCGCAAACGCCGTTCCGTGCA
GCTCATGGAGAAAAGGATGGACAAACTGGGTCAGTACAGCAAGGACGTGCGCAGATGCTGTGAGCATGGCATGCGGG
ACAACCCCATGAAGTTCTCGTGCCAGCGCCGGGCTCAGTTCATCCAGCATGGTGATGCCTGCGTGAAGGCCTTCCTG
GACTGCTGCGAATACATCGCAAAGTTGCGGCAGCAGCACAGCCGAAACAAGCCCCTGGGGCTGGCCAGGAGTGACCT
GGATGAAGAAATAATCCCAGAGGAAGACATCATTTCCAGAAGCCAGTTCCCCGAGAGCTGGCTGTGGACCATTGAGG
AGTTTAAAGAACCAGACAAAAATGGAATCTCCACCAAGACCATGAATGTGTTTTTAAAAGACTCCATCACCACTTGG
GAGATTCTGGCTGTGAGCTTGTCGGACAAGAAAGGGATCTGCGTGGCTGACCCCTATGAGGTTGTGGTGAAGCAAGA
TTTCTTCATCGATCTGCGTCTCCCCTACTCCGTTGTGCGCAATGAGCAGGTGGAGATCCGAGCTATCCTCTATAACT
ACAGGGAGGCAGAGGATCTCAAGGTCAGGGTGGAACTGCTCTACAATCCAGCTTTCTGCAGCCTGGCCACCGCCAAG
AAGCGCCACCAACAGACTCTAACGGTCCCAGCCAAGTCCTCAGTGCCCGTGCCTTACATCATTGTGCCCTTGAAGAC
TGGCCTCCAGGAGGTGGAGGTCAAGGCCGCCGTCTACAACCACTTCATCAGTGATGGTGTCAAGAAGACCCTGAAGG
TCGTGCCAGAAGGAATGAGAGTCAACAAAACTGTGGTCACTCGCACACTGGATCCAGAACATAAGGGCCAACAGGGA
GTGCAACGAGAGGAAATCCCACCTGCGGATCTCAGCGACCAAGTCCCAGACACGGAGTCAGAGACCAAGATCCTCCT
GCAAGGGACCCCGGTGGCCCAGATGGTAGAGGATGCCATCGACGGGGACCGGCTGAAGCACCTCATCCAAACCCCCT
CCGGCTGTGGGGAGCAGAACATGATCGGCATGACGCCCACAGTCATCGCTGTGCACTACCTGGACAGCACCGAACAA
TGGGAGAAGTTCGGCCTGGAGAAGAGGCAGGAAGCCTTGGAGCTCATCAAGAAGGGGTACACCCAGCAACTGGCCTT
CAGACAAAAGAACTCAGCCTTTGCCGCCTTCCAGGACCGGCTGTCCAGCACCCTGCTGACAGCCTATGTGGTCAAGG
TCTTCGCTATGGCAGCCAACCTCATCGCCATCGACTCCCAGGTCCTCTGTGGGGCCGTCAAATGGCTGATCCTGGAG
AAGCAGAAGCCTGATGGAGTCTTCGAGGAGAATGGGCCCGTGATACACCAAGAAATGATTGGTGGCTTCAAGAACAC
TGAGGAGAAAGACGTGTCCCTGACAGCCTTTGTTCTCATCGCGCTGCAGGAGGCTAAAGACATCTGTGAACCACAGG
TCAATAGCCTGTTGCGCAGCATCAATAAGGCAAGAGACTTCCTCGCAGACTACTACCTAGAATTAAAAAGACCATAT
ACTGTGGCCATTGCTGGTTATGCCCTGGCTCTATCTGACAAGCTGGATGAGCCCTTCCTCAACAAACTTCTGAGCAC
AGCCAAAGAAAGGAACCGCTGGGAGGAACCTGGCCAGAAGCTCCACAATGTGGAGGCCACATCCTACGCCCTCTTGG
CTCTGCTGGTAGTCAAAGACTTTGACTCTGTCCCTCCTATTGTGCGCTGGCTCAATGAGCAGAGATACTACGGAGGT
GGCTATGGATCTACCCAGGCCACTTTCATGGTGTTCCAAGCCTTGGCCCAATACCAGAAGGATGTCCCTGATCACAA
GGATCTGAACCTGGATGTGTCCATCCACCTGCCCAGCCGCAGCGCTCCAGTCAGGCATCGTATCCTCTGGGAATCTG
CTAGCCTTCTGCGGTCAGAAGAGACAAAAGAAAATGAGGGATTCACATTAATAGCTGAAGGGAAAGGGCAAGGCACC
TTGTCGGTGGTGACCATGTACCACGGCAAGGCCAAAGGCAAAACCACCTGCAAGAAGTTTGACCTCAAGGTTTCCAT
ACATCCAGCCCCTGAACCAGTGAAGAAGCCTCAGGAAGCCAAGAGCTCCATGGTCCTTGACATCTGTACCAGGTACC
TTGGAAACCAGGATGCCACTATGTCAATCCTGGATATATCCATGATGACTGGCTTCTCTCCTGATACTGAAGACCTC
AAACTGCTGAGCACTGGTGTGGACAGATACATCTCTAAGTATGAGCTGAACAAAGCCCTCTCCAACAAAAACACCCT
CATCATCTACCTGGACAAGATCTCACACACCCTGGAGGACTGTATATCCTTCAAAGTTCACCAGTACTTTAATGTGG
GGCTTATACAGCCTGGGTCAGTCAAGGTGTACTCCTATTACAACCTGGATGAGTCTTGCACCCGGTTCTACCACCCC
GAGAAGGAGGACGGGATGCTAAACAAACTCTGCCACAAAGAAATGTGTCGCTGTGCTGAGGAGAACTGCTTCATGCA
CCATGACGAAGAGGAGGTCACCCTGGACGACCGGCTGGAAAGGGCCTGCGAGCCCGGCGTGGACTATGTGTACAAGA
CCAGACTTCTCAAGAAGGAGCTGTCAGATGACTTTGACGATTACATCATGGTCATCGAGCAGATCATCAAATCAGGC
TCCGATGAAGTGCAGGTTGGACAGGAGCGCAGGTTCATCAGCCACATCAAATGCAGAGAAGCCCTCAAACTAAAGGA
GGGGGGACACTACCTTGTGTGGGGAGTCTCCTCCGACCTGTGGGGAGAGAAACCCAACATCAGCTACATCATTGGGA
AGGACACCTGGGTGGAGCTGTGGCCTGATGGTGATGTATGCCAAGATGAGGAGAACCAGAAACAGTGCCAGGACCTG
GCCAACTTCTCTGAGAACATGGTCGTCTTTGGTTGCCCCAACTGATGCCACTCCCCCACAGTCTACCCAATAAAGCT
CCAGTTATCTTTCACATTTAAAAAAAAAAAAAAAAAAAAAAAAAA

| | |
|---|---|
| SEQ ID NO: 28 | C3 Protein Sequence |

MGSTSGPRLLLLLLTSLPLALGDPIYTIITPNVLRLESEEMVVLEAHEGQGDIRVSVTVHDFPAKRQVLSSETTTLN
NANNYLSTVNIKIPASKEFKSEKGHKFVTVQALFGNVQVEKVVLVSLQSGYLFIQTDKTIYTPGSTVLYRIFTVDHK
LLPVGQTIVVTIETPEGIDIKRDSLSSHNQFGILALSWNIPELVNMGQWKIRAHYEDAPQQVFSAEFEVKEYVLPSF
EVQVEPSEKFYYIDDPNGLTVNIIARFLYGESVDGTAFVIFGVQDGDQRISLSQSLTRVPIIDGTGEATLSQGVLLN
GVHYSSVNDLVGKSIYVSVTVILNSGSDMVEAERTGIPIVTSPYQIHFTKTPKFFKPAMPFDLMVYVTNPDGSPARH
IPVVTEDFKVRSLTQEDGVAKLSINTPDNRNSLPITVRTEKDGIPAARQASKTMHVLPYNTQGNSKNYLHLSLPRVE
LKPGENLNVNFHLRTDPGYQDKIRYFTYLIMNKGKLLKVGRQPRESGQVVVVLPLTITTDFIPSFRLVAYYTLIAAN
GQREVVADSVWVDVKDSCVGTLVVKGGGKQDKQHRPGQQMTLEIQGERGARVGLVAVDKGVFVLNKKNKLTQRRIWD
VVEKADIGCTPGSGKDFAGVFTDAGLAFKSSKGLQTPQRADLECPKPAARKRRSVQLMEKRMDKLGQYSKDVRRCCE
HGMRDNPMKFSCQRRAQFIQHGDACVKAFLDCCEYIAKLRQQHSRNKPLGLARSDLDEEIIPEEDIISRSQFPESWL
WTIEEFKEPDKNGISTKTMNVFLKDSITTWEILAVSLSDKKGICVADPYEVVVKQDFFIDLRLPYSVVRNEQVEIRA
ILYNYREAEDLKVRVELLYNPAFCSLATAKKRHQQTLTVPAKSSVPVPYIIVPLKTGLQEVEVKAAVYNHFISDGVK
KTLKVVPEGMRVNKTVVTRTLDPEHKGQQGVQREEIPPADLSDQVPDTESETKILLQGTPVAQMVEDAIDGDRLKHL
IQTPSGCGEQNMIGMTPTVIAVHYLDSTEQWEKFGLEKRQEALELIKKGYTQQLAFRQKNSAFAAFQDRLSSTLLTA
YVVKVFAMAANLIAIDSQVLCGAVKWLILEKQKPDGVFEENGPVIHQEMIGGFKNTEEKDVSLTAFVLIALQEAKDI
CEPQVNSLLRSINKARDFLADYYLELKRPYTVAIAGYALALSDKLDEPFLNKLLSTAKERNRWEEPGQKLHNVEATS
YALLALLVVKDFDSVPPIVRWLNEQRYYGGGYGSTQATFMVFQALAQYQKDVPDHKDLNLDVSIHLPSRSAPVRHRI
LWESASLLRSEETKENEGFTLIAEGKGQGTLSVVTMYHGKAKGKTTCKKFDLKVSIHPAPEPVKKPQEAKSSMVLDI
CTRYLGNQDATMSILDISMMTGFSPDTEDLKLLSTGVDRYISKYELNKALSNKNTLIIYLDKISHTLEDCISFKVHQ
YFNVGLIQPGSVKVYSYYNLDESCTRFYHPEKEDGMLNKLCHKEMCRCAEENCFMHHDEEEVTLDDRLERACEPGVD
YVYKTRLLKKELSDDFDDYIMVIEQIIKSGSDEVQVGQERRFISHIKCREALKLKEGGHYLVWGVSSDLWGEKPNIS
YIIGKDTWVELWPDGDVCQDEENQKQCQDLANFSENMVVFGCPN

| | |
|---|---|
| SEQ ID NO: 29 | MICA Genomic Sequence |

GTATCATTTCAGTGAAGGTCACTCCAGTCTTTCATGGAGGCCAAACTAAGGGTGTAAATTAGGATCCTCACTGAAGT
GGCGGGACCCTAAGAGGCTTTTTCCTGGCCCCTTAGTTGTGGGTTTTCCTGCGGGCGGCGCAGCCGGTTTCCATCAG
AACCGCCCAGAGGCGGACGCTGCCTTCCTGGGGTGACGGAGCAGCAGGAAGCGTTTTCGGATCCTGGAATACGTGGG
CGGCCCGTGGGAGGGGCTGAGGCGCAGTTTCCTACTCACCCGGATCCGAATCCTCCGCGGTGCTGTTTCAAGAGAGC
CGGATTCCAGATCACGCTCCAGCCCGGACTCGGAATTCCTGCCCTGCGGGTCTGCATTTTCATAACGGGCAGGTGTG
AGTGCCCTGCAGCTGGAGACCAGAAGCCTGAAGGCAGCTCGGCCCTCCCCAGCCCACAGCGCCGTTATTCCGTTTCT
ATATCAGTAAACACATTTCATTTTCCGTAGACCAGGGCGGGGTGACGGGTGATCCCAGTCCTCGCAGTGAATTCCGG
GCAGCAAAATTCAAAACACATGCGGCCAAGGCCGGGCACGGTGGTTCACGCCTGTAATCCCAGCACTTTGGGAGGTC
GAGGCGGGCGATCACCTGAGGTCGGGAGCTCGAGACCAACCTGACCAACATGGGGAAATCCCGTCTCTACTAAAAAT
ATAAAATTAGACGGGCTTGGTGGTGAATGCCTGTAATCCCAGCTAGTCGGGAGGCTGAGGCAGGAGAATCGCTTAAA
CCTTGGAGGCGGAGGTTGCGGTGAGCCGAGATCGCGCCATTGCACTTCAGCCTGGGCAACAAGAGGGAAAACTCCGT
CGCAAAAACTTTCGGGGGCGGAGCGGAGCCCCGCCCTGGGTTATGTAAGCGACCGCGCTGGGCCGTTTCTCTTTCTT
TTCCGGACCCTGCAGTGGCGCCTAAAGTCTGAGAGAGGGAAGTCGCCTCTGTGCTCGTGAGTGCATGGGGTATAAGG
CAAGTGCTGAGGGAGAAAACGTAGTTGATGGGGTAGAGCAGACGGGGTTGGAGGTGGGGTGGAGGGGGAGGGCTTTG
GACAGAAGACCTGGGAGGCTTGGTGGGGGAGGGGCGCCCAGGCCTGGGCACTAAGAAACAAGTCCCCTGGAGCTCAA
GACCATCTCGGCCTCCCCTAGCCCAAGAGAGGACTGGCTTCATGACTCCCTGAAACCATTTCTAAATGCCTTAGAAC
AAACCTTGCATATTCATTATTGTTATTGAACTATTAAAAGTCTTTTTTGGGGGCGAGCTGAATCAGATCCTTTGCTG
GAGCTGGCACACGGAGGAAGTCCTGGAGGGAGGGTAGACACCGTGGAGGTAAGGGCTTGGGACCTGTGTCAGGAGAG
CTAGGTCCATCTCCCTCCCAGTCTCTCACTAGGCTTATGATCTTTAGCAGTGAAAATAATCTCTCTAAGGTGGGGAA
AGGACCCCGGTCCCTGCTGTGCTCAATAAATTATGAGGATCAAAATAAATTATCAGTGAATGTGAATGGGAAAACTA
AGAAATTGTTAAAATTCTCGAATACATTACATTTTCATCCACAGAAAAGTGTAGGCTAGGGATCATGGGGGAATAGT
TAGTAATGACAGGGATAGTTGAACTTAAAAAAAAAGTTTGTGAGGCTGACAAAGAAGAAACGGACACATTTCCTGAT
CTTGGAGGGTTCATAGGGTAGAAGATGGTAGATGACAGCTGGGTGTGGTGGCACTCGCCTGTAGTCCCAGCTACTCA
AGAGGCTGTGGTGGGAGGATTGCTTGAGCCCAGGCATTCAAGGCTGCAGTGAGCTATAATCATGCCACTGCATTCCA
ACTGAGTGACACAGCAAGACTCCTCTCTTAAAAAAAAAAAAAAAATTCATGGCAGGGCACAATGAGTACTATCAGGA
AGGTTCAAACCACGGGCTAAATCAGTAGTTCTAAAACTTGACTACACATCGGAATCACCTAGGGAACTTTAAAAGAT
ACTAAGATTTAGGTCCAACCTGGGTTTACTGATTTAACAACCTAGGTTGTGGCTGTGGCCTGGGAACATGGATATTA
AAAACTCTCCAGGTGGTTCTACGCAGTGGCTAGGTTTGATGACCTCTGCCTAGATGTCCCAACGACTAAGAGATGTG
CGTTGGGGACAAGGCAATTCTCTTAGTAGAAAGAGGCTTTCGGGACAGCATTCTTATTATTGAGAATTGAGAATTCA
TATGCCACACAATTTATCCTTTTAAAGTGTGCAGCTCAGTGGCTTCTAGCGTAATCACAAGGTTGTGCCACCGTCAC
CACTGTCTACCCTGGAAGATTTTTTTTCCTTTTTTTCTTTTTTCTTTTCTTTTTATTTTAAAGGCTAGTCAAGTGAA
ACAGTGGGAGTGAAGAAGAAACAAAGACATCTATAACTGGTTGTGATCAATTAGTTGTAAACACTGCACTCAGACCA
GCCTGGGAAGATTTTAAGGATATGGTGTGGTCTGATGGGTTCCAAGGCAGAGGTTACAATAGCCTGGAAGAGGGAGA
CTGCTTAGGCAGTGGCATCCTGGTGGGATAGGGTGAGGAGATCCCAGAGCCCACGTTTACTGCAACCCTGGGGAGAT
GTCACCAGAGAAATGGGGGTGGTGCCAGACAGCAGATTGTGGCAGCTGAGGTTTTCCACGGTAGAGTAGAAGCATCC
ATCATGTGTGACATTCAGCAGATGGGGCGCTGTGGGTGGCTTGGAGCACTCTGGTTGTAACTGAGGCAGGCACCGTG
TTTAGGAAGGCTGTGCAGTAATCTAGGCTGAAGGGAGGGGAAAGCCTAGACTAAGATTGTGGCTGTGGGATTGAAAT
AGCGTTGAAGGAGCTGACTTTGACTCCCGGAGATGATGGGGAAAGAGGAAATCAGAAGGGACCAAGGATGGTGATGT
TCTTAAGAGAAACTGAGGAGGAAGAGAGGATGATATGGTGGCAGACGTATAGAGAGTCTTTGTAGATCTCTCACATT
GGAGGGGACTATGGTCGGAGGTACAGATGTCCTAAGGCAGGCTGGAAAAGGGAGTCTGGAGAGAGCTTGGTGTTGTA
GTGAACCACAGGGAGCCGCCTCCTTGGCCCTGTGATCACCCAGGGACTGAATAGAGAGGCGGCCCTGGGAGACTTCA
GACACTTAGAGGATATAAGGGGGTGAAAGGGGGGCCTGGCTTTGAGTCAAAGGGAGGAGAAGGAGATTATAAAGCTG
AAACGTCTAAGAGAGTTTGTGGTCTGAGCGGTTCTACTGCGGCAGGTGCTTCTGAGAGGCAGAGGTGGCTGAGATCT
GGAAACAGGTCTGCAAATCTGGTCACTGGTCTCATTGCCAGTAACGCTGTGCGCGGTTGAGGGAGTGTGTTGGGAGA
ATAGCCACGCGTTGTCTGTCCTGGAAGGAACAAGCCAGTGAGAGCCGGTTTAATGGGGCGGCCGGCGAAAGGGGCTT
GGTGAGGCCCGCGCTCCTCGGGGTGGGGGCGCGGGGATGGGTGGTCGCGATGCCGGGAGGGCAGGCAGGGCCCTGGC
CGTGCTTATGAAGTTGGAGCTGTACTCTCAGCTACTCGAAGCTGGTCCCTGCTTTAGGCTGCGCTCCCGCGTGCTCC
CCATTTTCTGGGCCCCAGGTCCCGCCTTCTAAATCTCCCCAGGTCTCCAGCCCACTGGAATTTTCTCTTCCAAGCGT
GGCCCCGCCCTCTCCGCTCGTGATTGGCCCTAAGTTCCGGGCCCCAGTTTCATTGGATGAGCGGTCGGGGGACCGGG
CCAGGTGACTAAGTTTCCGCGGCGCCTTCTCCCCGGCCACTGCTTGAGCCGCTGAGAGGGTGGCGACGTCGGGGCCA
TGGGGCTGGGCCCGGTCTTTCTGCTTCTGGCTGGCATCTTCCCTTTTGCACCTCCGGGAGCTGCTGCTGGTGAGTGG
CGTTCCTGGCGGTCCTCGGCGGAGCGGGAGCAGTGGGACGTTTCCGGGGGTCGGGTGGGTAGCGGCGAGCGCTGTGC
GGTCAGGGCGGGGCTCCTGTGCCCTGTCGGTGGCGCAGGGAGCTGGACGCGGCCCGTTACCGCCACACTTCAGCCCT
GCTTCCCCGTCACTTTTCAGTCCTCCTCGGGATCGCGCATCACCTGCACTTTCTGGTCTCCTCCTGCTCTTTCTCTC
CTCGCGTCTCCTCCGCTTCCTCTCACTTTTCGGACAAACCAGTCCTTCTGAGGCCCATGGGTTCCCGGGCTGCCTCC
GGGGCTGCTCCTGTGAATGGCATTCGAGTGCCCTTCCAGCGCGGCCACTGAAGCAGCCACAACCCCCGGTGCTCGGG
GCGGCTCTCAGGTCCCTGAAGTCCTGTCCTCTCCCGGAGCCGACGTGTTCTCAGCTCCTGGGCCGCAGCTCCTGGAG
TAGGGGCCCTCCTTTCTCGGGACCCGGAGCTGGTGCTTCCTGCTGCTGTGGGGACTGTGGGGGGTCCTGACTCTCAA
GCTGAGGGGTTGGAGTCTGCAGGCTCCGGGCAGAGGATTCTTCCTGCGACTTCTCTCATCCCCAGCTCATTCTCCCC
TCGCCTCTGGCTCCGAGGGTCCTCTCCTCTCTCTCATCCCACCCCTACTAATGACCAGTGATCTAAGGACACCAGAT
TCCCTCTCACCTCCTCCCTGCCCATCTCAGGGCCCGCTGAGTCCTTTTGCCCTCCCAGCTCCCTGCTACCCCTTCCT
GTGTGCTGTTCTCTGATCCATTTCTAGGGTGTCCTCTGCCCTCATCCCCTGTCCCCGCCACCGAAGGTCCCTCCTGC
ACCCCTTATGGGCCTTTCCTACAAGCAGCCTTCACCCAGTGCTGCCCCTATGCCTCCCCGTTCCCAAATGTCCCTGA
CTCTAACTTTCTGGTGCTGCCTTTTATCCGGGGGGGTCTTCCCTCCATCCCACTCCCCTCCAGACCCCCAAGGGGAA
CCCTGATGCTAATGGCAGTTGGGCCTTAGGCAGGGCGCAGGGCAGCGCAGATGCCCCCTCCCCTCCAGTGCAGATGC
CTGCTCTGGACCCTGCCTCATGGTGGCCCCTTCCCCACTCCTTCATCCTCAGCCTCACCCTCTTGAGGACCCCACCC
TCCAGCCCACAGGTGCTGGACCATCCCTCCCTGGTCCCTCCGCCCCTCTCCACCTTGGGACCTTGTGCTGCTCCTGT
CTCTTGCCCAGCTGCCTTGGGCCCTCAGCACGTTCTCATCTTTCAGTGGGAAAGTGGGAGTGCTGGAGCATATGACA
GTGCTGAGCATCTTTCCCAAGCCCCACCCTCCCCCAGAGCACCCTCCCCTCCTGTCCTCACCCTACCCCAAGTTCTC
CCACAGTCACTCCTGCCCCATGCTCATGCCGCCCTCCAGTTCTTGCTCTGCCCATCTCCCCTCCCCAACCCAGACCT
AAAACAGGCTGTTGGGCCAACTGTTCCTTGACCTTCCTTCTTTTCTTTTGGTTCCTTGACCCCAGTGGGCTCTCACT
CCCCACACCGCATATCTAAAATCTGTTTTGCCTGCTCTTGGGGTGCCACTGCTCCCCCTCCAGCATTACTCCTTTTG
GCAGGTCCTTCCTCAGGCTGAGAATCTCCCCCTCTACCTTGGTTTTCTCTCTCTGGCCAGCACCCCCACCCCTTGCT
TTGTTTTTAATTTTTAACTTTTGTTTGGGTACGTAGTAGATATATATGTATATATTTATGGGGTACATGGGATATTT
TGACACAGGCCTACAATATGTAATAATCACATCAGGGTAAATGGGTTATATCACAACAAGCATTTATCCTTTCTTTG
TGCTACAAACAATCCCATTATGCTCTTTCAGTTATTTTTAAATGTACAATAAATTATTGTTGACTGTACTCACCCTG
CTGTGCTATCTACTAGATCTTATTCATTCTAATTATATTTTTGTACCCATTATTAACCATCCCTGCTCCCCCACTCC
CCACTACCCTTCTCAGCCTCTGGTAATCATCATTCTATTGTCTCTCCCCATGAGGTCCATTGTTTTAAATTTTGGCT
GCCACAAATAAGTGAGAACATGCAAAGTTTGTCTGTCTGGGCCTGGGGCTTATTTCACTTCACAGGATGACCTCCAG
TTCTTTGCAAATGACACGATGGCTGAATAGTTCTCCACATACACATGTACACCACATTTTCTTTATCCATGCGTCTG
TTGATGGACACTTAGATTGCTTGCAGATCTTGGCTACTTTGAATAGTGCTGCAATAAACATGGAAAAGTAGATAGCT
CTTTAATATACCGATTTCCTTTCTTTGGAGTATATGCCTAACAGTGGGAGTGCTGGAGCATATGACAGCTCTATTGT
ATTTTTAGTTTTTGGAAGAACCTCCACATTGTTTCCCATAGTGGTTGTACTAGTTTACGTTCCCACCAACAGTGTAC
ATCCTCACCAGCATTCCTTATTTCTACATCCTCGCCAGCATTCCTTATTGCCTGTCTTCTGGATAAAAGCCAGTTTA
TCTGGGGTGGGATGTTATCTCGTAGGAGTTTTGATTTGCCTTCATCTGTTGACGAATGATGTTGAGCACCTTTTCAT
ATACCTGTTTGCCATTTATATGTCTTCTTTTGAGAAATGACTATTCAGATCTTTTCTCATTTTTAAATTGGATTATT
ATATTTTTTTTCCTATAGTTGTTCGAGCTCCTTATATGTTTCAGTTACTGATCCTTTGTCAGATGAATAGTTTGAAA
ATATTTTCTCCCATTCTTGGATGGTCTCTTCATTTTGTTTATTGTTTCCTTTGCTGTGCAGAAGCCTTTTTACTTGA
TATGATCCCATTTATGCAATTTTACTTTGGTTACCTGTGCTTGTGGGGTATTACTTTAAAAATCTTTGCCCAGTCCA
ATATCCTAGAGAGTTTCCCCAATGTTTTCTTGTATAGTTTCATAGTTTGAGGTCATAGATTTACATCTTTAATCCAC
TTTGATTTGATTTTTGTATATGGTGAAAGACAGGGTCTAGTTTCATTCTTCTGCATAAGGATATCTAGTTTCCCCAG
CACCATTTTTGAAGAGACTCTCCTTTGCCAATGTGTGTTCTTGGTACCTTTGTTGGAAATGAGTTTACTGTAGATGT
ATGGAATTGTTTCTGGGTTCTCTATTCTGTTTCATTGGTCTGTGTGTCTGTTTTTATGCCAGTATCATGCTGTTTTG
GTTACTGTAGCTCTGTAGTATAATTTGAAGTCAGATAATGTGATTCCTCTAGTTTTGTTCATTTTGCTCAGGATAGC
TTTATCTATTCTGGTTTTTTTGTGGTTCCATATGCATTTTAGGATTATTTTTATTATTTCTGTGAAGAATGTCATTA
GTGTTTTGATAGGGATTGCATTGAATCTGTAGATTACTTTGGGTAGTATGGATATTTCAACAAAACTGATTCTTCCA
ATCCATGAACGTGGACTATCTTTTCCATTTTTTGTGTCCTTCAATTTTTTGCATCAGTGTTTTTTGTTTTTGGTTTT
TGAGATGGAGTTTCACTCTTGTTGCCCAGGCTAGAATGCAAGGGTGTGATCTTGGCTCACCGCAACCTCCGCCTCCC
AGGTTCAAGCTATTCTTCTGCCTCAGCCTCCCAAGTAGCTGGGATTACAGGCATGTGCCACTGTGCCTGGCTAATTT
TCTATTTTTATTAGAGATGGGGTTTCTCTATGTTGGCCAGGCTAGTCTTGAACTCCTGACCTCAGGTGATCCACCTG
CCTCGGCCTCCCAAAGTGCTGGGATTACAGGCATGAGCCACCACGCCCAGCCACATCACTGTTTTATAGTTTTTATT
GGAGAGGTCTTTCACTTCTTCAGTTAGGTTTATTCCTCAGTATTTTATTTTATTTGTAGCTATTGTAAATGGGATTC
GTTTCTTGATTTCTTTTTCAGATTATTTGCTGTTAGCACTGATTTTTGCATGTTGATTTTGTATCCTGCAACTTTAC
TGAATTTGTTCTTCAGTTCTAATGGTTTTTTGGTGGAGTCTTTAGGTTTTTCCAAATATCAGACCACATGATCTGCA
AACAAGGATAATTTGACTTCTTCTTTTCCAGTTTTAATGCCCTTTCTTTCTTTCTCCTGTCTGATTGCTCTAGTTAG
GATCTGCAGTACTGTGTTGCATAACTGTGGTAAAATTAGTCATCCTTGTCTTATTCCAGATCTTAGAGAAAAGGCTT
TCAGTTTTCCCCCATTCAGTATGTTACTAGCTGTGAGTTTGTCATATATGGCTTTTATTATATTGAGGTCTGTTCCT
TGTATACTTAGTTTTTTGAGAGTTTTTATCATGAAGGGATGTTGAATTTATCAAATGCTTTTTCAGTATCAATTGAA
TGATACTGGCTTTTGTCCTTTATTCTGTTGATATGACGTATTACATTGATTGATTTGTGTATGTTAAATCATCCTTG
CATACCTGGAATACATTCCACTTGCTCATAAAGAATGATCTTTTTTAATGTATTGTTGAATGTGGTTTGCTAGTATT
TCCTTGACGATTTTTGCATCGGTGTTCATCAGGGATATAGGCCTGTAGTTTTCTTTTTTATGATGTGTCTTTGCCTG
GTTTTTGTATCAGGATATTCCTGGCTTTGTAAAATGAGTTTGGAAGTATTCCCTCCTCCTCTATTTTTCAGAACAGT
TTGAATAGGACTGACATATGTTGTTCTTTAAAAGTTTAATTGTGGTAAATTATACATTACATAAATTTTACTGTTTT
AACCACTTTTAAGTGTATACTCGGTGGCATTAGATACATTCACATTTTTGTGCAACCCAAAACTCTGTGCCCATTAA
TCGGTAACTCCCCATTCCTCCCTACCTCTGGCCCCTGGTAACCACCATTCTACTTTTTGTTTCTATGAATTTGACCA
CTCTAGGTACCTCATTTAAGCAGAATCATGTAATGTTTGTCTTTTTGTTTCTGGCTTATTTCACTTATAATATTTTT
GAGGTTCGGTGGGCACAGTGGCTCACGCCTGGATTTCCAGCACTTTGGGAGGCTGAAGCAGGTGGATCACCTGAGTT
TCGGAGTTCGAAACCAGCCTGGCCAACATGGTGAAACCCCATCTCTACTAAAAATAATAAAAGTTAGCCGGGCGTGA
TGGCGGGTGCCTGTAATCCCAACTACTTGGGAGGCTGAGGCAGGAGAATCGCTTGAATCCGGGAAGTGGAGGTTGCA
GTGAGCTGAGATCAGGCCACTGCACTCCAGCCTGGGCAACAAGAGTGAAATTCCATCTCCAAAAAAAAAAATAAAAC
AATAATAATAATAATATTTTTGAGGTTCATCCAAGTTGTAGTATGGGTCAGAATTTCATTCCTTTTAAGGATGGATA
ATACTCATTATATGTATGTACCACATCTTGGTTATCCATCCCTCAGACAATGGACACTTGGGTTACTTCTACCTTTT
GGATATTGGCAAATATTTCATTTCCTTTGGGTATATATTTATTTCCTTTGGGTATTTCTTTTGGGTATATATCCAGA
AATAGAAGCAGTACACAGGGGCTTCATTTTCTCTGTCTCTTTGCCAACCTTGCTCTGTGTGTGTGTGTATGTGTGTG
TGTAGGTGTGTGATAACAGCCATCCTGATTGGTTTCAGGTGGCATCTCATTGTGGTTTGGATTTGCATTTTCCTAAT
GAGTGCTGATATTGAGCATCTTTTCATGTGTTTGTTGATCATTTGTAATTTTCTTTGAAGAATTGGCCATTTAAGTC
TTTTGCCCATTTTTTCCCCCACATAGCTTCTCTTATCAGATATATGACTTGCAATATTTATTTCATTTCGGGGTTGA
TTGCTTTTTCACTCTGATTGTGCCCTTTGATGCATAGATGTTTTGAATTTTCATCAGTCTACTTTGTCAGTTCTTTC
TATTCTATCTGTGCTTTGGTGTCATATCCATGAAAGCACTGTCAAATCCTATGTCATGAACATTATCCCCAATGTTT
GCTTCTAAGAAATTTTTAGGTTTTAGTTCTTGAGTGTAGAGTTTAGGTCTTTGATTCATTTTGAGTTAATTTTTGTA
TATAGTGCAAATTAAGGGTCCAATTTTATTTTAACACCCCCTGCCCCCAGAACTATTTGCTGAAAAGATCAACTGAC
TCTTTGTCACCTGCTCACCCCAGTGGACACTAGCTGTTCCATCCAATTGCTGTCCTGGGGCCTTGTCATGCTACTCT
TCCACTTTGAACCCAAGCCCACACCGTTCGTTGCTCCCCTCTGGGATACTGACCCCACTATAAACTTCTCTGGGGCT
ACAACCTTCCTACCCTTTGTGCCTCATGACCACCCCCTCCCTTGTCCCCGCCATGCCCATGATGAGTCTCTTCTCGA
GGCAGCTCCCCTTGCCTCCATCTCACCCTCAGCCTATGCACCACAGCCACACTGGACATGGGTCCCTCTGAGCCTGA
GTCCCTTCCCATTCCCACCATCCCCTCTGGCAAGACCTTCCTTCCACCACCTTCATGCTCCTCCCTTGCCCCTGCAG
GGCAGCCTCTCCCCTTGGCCCCTATTCCCTTAGGGGGCTTGTGGCCACCCAGTCCTTGCACCTGGCCTACAAGTTTG
CCATCTTCATTCCCCCTTCTTCTGTTCATCAGCCCCCTCCTCTATCCTCCCACCCTCACAGTTTTCTTTGTATATGA
AATCCTCGTTCTTGTCCCTTTGCCCGTGTGCATTTCCTGCCCCAGGAAGGTTGGGACAGCAGACCTGTGTGTTAAAC
ATCAATGTGAAGTTACTTCCAGGAAGAAGTTTCACCTGTGATTTCCTCTTCCCCAGAGCCCCACAGTCTTCGTTATA
ACCTCACGGTGCTGTCCTGGGATGGATCTGTGCAGTCAGGGTTTCTTGCTGAGGTACATCTGGATGGTCAGCCCTTC
CTGCGCTATGACAGGCAGAAATGCAGGGCAAAGCCCCAGGGACAGTGGGCAGAAGATGTCCTGGGAAATAAGACATG
GGACAGAGAGACCAGGGACTTGACAGGGAACGGAAAGGACCTCAGGATGACCCTGGCTCATATCAAGGACCAGAAAG
AAGGTGAGAGTCGGCAGGGGCAAGAGTGACTGGAGAGGCCTTTTCCAGAAAAGTTAGGGGCAGAGAGCAGGGACCTG
TCTCTTCCCACTGGATCTGGCTCAGGCTGGGGGTGAGGAATGGGGGTCAGTGGAACTCAGCAGGGAGGTGAGCCGGC
ACTCAGCCCACACAGGGAGGCATGGAGGAGGGCCAGGGAGGCATACCCCCTGGGCTGAGTTCCTCACTTGGGTGGAA
AGGTGATGGGTTCGGGAATGGAGAAGTCACTGCTGGGTGGGGGCAGGCTTGCATTCCCTCCAGGAGATTAGGGTCTG
TGAGATCCATGAAGACAACAGCACCAGGAGCTCCCAGCATTTCTACTACGATGGGGAGCTCTTCCTCTCCCAAAACC
TGGAGACTGAGGAATGGACAGTGCCCCAGTCCTCCAGAGCTCAGACCTTGGCCATGAACGTCAGGAATTTCTTGAAG
GAAGATGCCATGAAGACCAAGACACACTATCACGCTATGCATGCAGACTGCCTGCAGGAACTACGGCGATATCTAGA
ATCCGGCGTAGTCCTGAGGAGAACAGGTACCGACGCTGGCCAGGGGCTCTCCTCTCCCTCCAATTCTGCTAGAGTTG
CCTCACCTCCCAGATGTGTCCAGGGAAACCCTCCCTGTGCTATGGATGAAGGCATTTCCTGTTGGCACATCGTGTCC
TGATTTTCCTCTATTGTTAGAGCCACTGGATAAAGACAGAGGGTCAGGGACTGGACCATCCAGTGTTGTAATCAGGG
CAAGTAGAGGACCCTCCGACAGAATCCTGAGCCTGTGGTGGGTGTCAGGCAGGAGAGGAAGCCTTCAGGGCCAGGGC
TGCCCCCTCTGCCTCCCAGCCTGCCCATCCTGGAGAGTTCCCTCCTGGCCCCACAACCCAGGAGTCCACCCCTGACA
TCCCCCTCCTCAGCATCAATGTGGGGATCCCAGAGCCTGAGGCCACAGTCCCAAGGCCCATCCTCCTGCCAGCCTGG
AAGAACTGGGCCCCAGAGTGAGGACAGACTTGCAGGTCAGGGGTCCCGGAGGGCTTCAGCCAGAGTGAGAACAGTGA
AGAGAAACAGCCCTGTTCCTCTCCCCTCCTTAGAGGGGAGCAGGGCTTCACTGGCTCTGCCCTTTCTTCTCCAGTGC
CCCCCATGGTGAATGTCACCCGCAGCGAGGCCTCAGAGGGCAACATCACCGTGACATGCAGGGCTTCCAGCTTCTAT
CCCCGGAATATCATACTGACCTGGCGTCAGGATGGGGTATCTTTGAGCCACGACACCCAGCAGTGGGGGGATGTCCT
GCCTGATGGGAATGGAACCTACCAGACCTGGGTGGCCACCAGGATTTGCCGAGGAGAGGAGCAGAGGTTCACCTGCT
ACATGGAACACAGCGGGAATCACAGCACTCACCCTGTGCCCTCTGGTGAGCCTAGGGTGACCCTGGAGAGGGTCAGG
CCAGGGTAGGGACAGCAGGGATGGCTGTGGCTCTCTGCCCAGTGTATAACAAGTCCCTTTTTTTCAGGGAAAGTGCT
GGTGCTTCAGAGTCATTGGCAGACATTCCATGTTTCTGCTGTTGCTGCTGGCTGCTGCTATTTTTGTTATTATTATT
TTCTATGTCCGTTGTTGTAAGAAGAAAACATCAGCTGCAGAGGGTCCAGGTGAGAAAAGCGGGCAGTTTCTGGAGAT
GGTAAGGCCCCTGTCTGGGCAGTAGGGTCCCCTCATTGCTCCTGCAAAGATAGGCATGTTGGTGACAAGGCTTCCAT
AACAGGGGATGAAAGTTGGGGAATTTGGGAAGGGAATGGGGGCAGCATCTCCATCTACACCCATAAGTGCTGCCCAA
GCAAGGGTCAAACGCCCAGCTGTGGCATCCTCCTGCTGCAGGTGAGGAGTGGGCAGCAGGGAGGGCTGCGGCGCCTG
CTCTGTCCCCATCCCGGTCTCTGTGTCTCTTGAACTCACTAGGGCGCATCCAGGTGGGGTGAGCTGGGAATCACGTG
CTGAATGCTAAGGGCCTGGATGATCACGGCCTCAGAGGGAGCAAATAGTAAAGGCAGCTGTGATCTGGGGAGGGCCA
GAAACTGGAGAGGAATCTGAGGAGAGGCGGTGCCCCTATTCCCTTCCTCTCTGCATCCCCCTCCCCTGTTTCTCCAG
CCATCGGGGCGGACACCGAGAAAAAGACCTATGAGGCCCAGCCTGGGGGCCCTGCCTGTGTAGCCCTTTGGAGACCC
CTTGTAACAGGGAGGGTCCTGAGCACACATGGCCATCTCTGTCCACTTTGCAGCTCCCCATGCACCTCCTCCAGGAG
CTTTCTTGGGGTTGTCGTGTCCTCTGCACCATTCGAGGCCCTACTCTTTCCAGGTTCCCACGGCCTGGCCTCCCTGA
GTTTCTTGCAGATGACATGGATGAGTAGATAAGCAGATGTCCCTGGGCCATTTGAGGAGTGGGGCCCAGCCCCTCAT
CAGGGCAGCTGTGGTCCCTGTTTTCATCCTACCTCCGAGTGTTTTCTTCTCCAGTCCCTGAGGGACACAGTCCTCAG
GGCCCATGTTTTTGGGGATTTAATCTGTGCTCTGTGGCCTCACCTTGCCCTCCCTGAGCCAATTTCCCTTTCTAAAG
GTGGTCACTGCCTGGTAAGTTTGGAGTAAGGGACGGTCAGAATCATTTCCCCTACAGTCAGGTTGTTTGATGGGGGA
TGAAAAGAGACAGCAGGAAGTTTTGTGTTTCTGCAAAGACAGAAGCAGTTCAGGCGACAGTAAGAGGCTGGGGTGTC
CAGGAGGATGTGTCTGGCAGTAGGGTCGCTGGTTTCTCATCCTTGAACCTAATTGCACTGTCAATCGGCCCCTCAGG
CCTGAGCAGATGGGAAGGTTTGTCCCCTGCCCTGCAGCAAGAGGGCCCTGTCCAGGAGGCACCCACAACAGGGGCAG
TGCAGGTCTGTGGTCACTCCTGCTCTCACCTGTGGCGTCTCCCGTAGAGGGATTGTCAGTTCTGGTTCCCTGTGGGC
AGGAATGGTTTCCTCATAGGTCACTGGAGTTTTGGCCAGGAAAAGAGTATGAAGTTCATGTGCCAGTTTCTCAAAAT
TCCTGCTTTCAATGTTGATGTCCAGTAAAGATATTCGTAATTTCAGCTCTATAATCTTAATAGGATTTCCTCTAATA
TTGTGAAGCATATTATATGAAACAGGAACACAAATTTCTCAAAATTCCTGCGATGTCCAATAAAGATTTTCATAATT
TCAGCTCTGCAATCTTAATAGGATTTCCTAATACTGTAAAGCATATTAAATGAAACAGGAACTCAAATTTGGAGCCC
CCTCTCCAGGAGGTTCTGTGTGGAGATGGTGGCTGTGGCAGTGGCAGTTCCCAGGTGCAGAGGGTGGGCAGAGGCAG
CCTCAGGCTAAGGGGTCTCCCCTACTCCACATGGAGAAAATCCCTTGTAGGTTGCAAGGGCAGTGGCCGGGTGGAAT
CCCTGCTAGGGACAGAGCAGGAAGGCCTCGCAGCCTCACCAAGCAGCAGCCCTGGGGTGGAGCTGCGTTTCCAGGGT
TAAGCGGACCAGGCAGGAGTAGCGGTTACTCAAGAGCAGGTCACAGGCTTGGGTTGTGAGGGTCAGGAGAGGCCAGG
CCTCCTCGAGCAAGGTGGGGGTCCCAGGGTCAGGTCAGGTGCAGATCCTGTGGCAGCCACGTCTTTCCATGCTGGGC
CTGCTGGGCCCCCCAGGCTTCCTGATGGGGTCCCCAGTTAGGAGCTGCCTGCTCAGGGCTGGGAGGGGAGGAGCACT
GAGCTGCAGATAGAGGGCAGAGCCCACAGTGGGCAGGGCCTGCCCTGGTGTGTAGGTGCCTCTGAAGGAGAGGAGGG
CCTGGGGACTGAGAGCAAGGGTCAGGGCCTCTCTTTGGGGAGGCCTCTCACTGTAACAGGACTGGTCAGGCCTGAGA
GGAGGGCACTGGGTTCCCTCTTGGGTCTTGTCCTTTAGTCTTGGGGCCCTTTCCCTCCCTGCACGATGAGTGGTGGG
CACAGGGCACGGGCTGATGTTGATGGAGTGATGGGAGGGAACTGGCAGGGGCTGGGAAAAGCAAGGAGGGAGGAAGA
AAAAAGTGGGGGCCTCATCTTCCCTCAGAGAAAGGGCAAATCTGGTTTTGGAGCAACTGAAGAGAGAAAAGTCCCCA
GGGAATAAACACAACACTGCACCCAGTGGAGCATTTACCCATTTCCCTCTTTTCTCCAGAGCTCGTGAGCCTGCAGG
TCCTGGATCAACACCCAGTTGGGACGAGTGACCACAGGGATGCCACACAGCTCGGATTTCAGCCTCTGATGTCAGCT
CTTGGGTCCACTGGCTCCACTGAGGGCACCTAGACTCTACAGCCAGGCGGCTGGAATTGAATTCCCTGCCTGGATCT
CACAAGCACTTTCCCTCTTGGTGCCTCAGTTTCCTGACCTATGAAACAGAGAAAATAAAAGCACTTATTTATTGTTG
TTGGAGGCTGCAAAATGTTAGTAGATATGAGGCATTTGCAGCTGTGCCATATTAA

| | |
|---|---|
| SEQ ID NO: 30 | MICA cDNA Sequence |

AAGTTTCCGCGGCGCCTTCTCCCCGGCCACTGCTTGAGCCGCTGAGAGGGTGGCGACGTCGGGGCCATGGGGCTGGG
CCCGGTCTTCCTGCTTCTGGCTGGCATCTTCCCTTTTGCACCTCCGGGAGCTGCTGCTGAGCCCCACAGTCTTCGTT
ATAACCTCACGGTGCTGTCCTGGGATGGATCTGTGCAGTCAGGGTTTCTCACTGAGGTACATCTGGATGGTCAGCCC
TTCCTGCGCTGTGACAGGCAGAAATGCAGGGCAAAGCCCCAGGGACAGTGGGCAGAAGATGTCCTGGGAAATAAGAC
ATGGGACAGAGAGACCAGAGACTTGACAGGGAACGGAAAGGACCTCAGGATGACCCTGGCTCATATCAAGGACCAGA
AAGAAGGCTTGCATTCCCTCCAGGAGATTAGGGTCTGTGAGATCCATGAAGACAACAGCACCAGGAGCTCCCAGCAT
TTCTACTACGATGGGGAGCTCTTCCTCTCCCAAAACCTGGAGACTAAGGAATGGACAATGCCCCAGTCCTCCAGAGC
TCAGACCTTGGCCATGAACGTCAGGAATTTCTTGAAGGAAGATGCCATGAAGACCAAGACACACTATCACGCTATGC
ATGCAGACTGCCTGCAGGAACTACGGCGATATCTAAAATCCGGCGTAGTCCTGAGGAGAACAGTGCCCCCCATGGTG
AATGTCACCCGCAGCGAGGCCTCAGAGGGCAACATTACCGTGACATGCAGGGCTTCTGGCTTCTATCCCTGGAATAT
CACACTGAGCTGGCGTCAGGATGGGGTATCTTTGAGCCACGACACCCAGCAGTGGGGGGATGTCCTGCCTGATGGGA
ATGGAACCTACCAGACCTGGGTGGCCACCAGGATTTGCCAAGGAGAGGAGCAGAGGTTCACCTGCTACATGGAACAC
AGCGGGAATCACAGCACTCACCCTGTGCCCTCTGGGAAAGTGCTGGTGCTTCAGAGTCATTGGCAGACATTCCATGT
TTCTGCTGTTGCTGCTGCTGCTATTTTTGTTATTATTATTTTCTATGTCCGTTGTTGTAAGAAGAAAACATCAGCTG
CAGAGGGTCCAGAGCTCGTGAGCCTGCAGGTCCTGGATCAACACCCAGTTGGGACGAGTGACCACAGGGATGCCACA
CAGCTCGGATTTCAGCCTCTGATGTCAGATCTTGGGTCCACTGGCTCCACTGAGGGCGCCTAGACTCTACAGCCAGG
CAGCTGGGATTCAATTCCCTGCCTGGATCTCACGAGCACTTTCCCTCTTGGTGCCTCAGTTTCCTGACCTATGAAAC
AGAGAAAATAAAAGCACTTATTTATTGTTGTTGGAGGCTGCAAAATGTTAGTAGATATGAGGCGTTTGCAGCTGTAC
CATATTAAAAAAAAAAAAAAAAAA

| | |
|---|---|
| SEQ ID NO: 31 | MICA Protein Sequence |

MGLGPVFLLLAGIFPFAPPGAAAEPHSLRYNLTVLSWDGSVQSGFLTEVHLDGQPFLRCDRQKCRAKPQGQWAEDVL
GNKTWDRETRDLTGNGKDLRMTLAHIKDQKEGLHSLQEIRVCEIHEDNSTRSSQHFYYDGELFLSQNLETKEWTMPQ
SSRAQTLAMNVRNFLKEDAMKTKTHYHAMHADCLQELRRYLKSGVVLRRTVPPMVNVTRSEASEGNITVTCRASGFY
PWNITLSWRQDGVSLSHDTQQWGDVLPDGNGTYQTWVATRICQGEEQRFTCYMEHSGNHSTHPVPSGKVLVLQSHWQ
TFHVSAVAAAAIFVIIIFYVRCCKKKTSAAEGPELVSLQVLDQHPVGTSDHRDATQLGFQPLMSDLGSTGSTEGA

| | |
|---|---|
| SEQ ID NO: 32 | MICB Genomic Sequence |

CTGTTTCCAGCGAGTCAGATTCCAGATCGCGCTCCAGCCTGGACTCGGAATTCCTGCCCCGCGGGTCTGCATTTTCA
CAGCGGCAGGTGTGAGTGCCGCGCAGCTGGAGACCAGAAGCCTGAGGCAGCTCGGCCCTCCCCAGCCCAAAGTGCCG
TTATTCCGTTTCTGTATCAGTAAACACGTTTCATTTTCCGTAGACCAGGGAAGGGTGATGGGTGATCCCAGTCCTCG
CAGTGAATTCCGGGCCACAAAATTCAAAACGCTTGCGGGCAAAGCCGTGCGCGGTGGCTCAAGCCTGTAATTCCAGC
ACTTTGGGAGGCCGAGGCGGGCGGATCACCTGAGGTCGGGATTTCCAGACCAGCCTGACCAACATAGAGAAACCCCG
CCTCTACTAAAAATACAAAATTAGCCGGGGGTGGCGCATGCCTGTAATCCCAGCTAGTCGGGAGGCTGAGGCAGGAG
ACTCACTTGAACCCGGGAGGCGGAGGTTGCTGTGAGCCGAGATCGCGCCACTGCACTCCAGCCTGGGCAACAAGAGC
GAAACTCCGTTTCAAAAAAAAACAAAAAACAAAAAGCTTTCGGGCGCCGAGGGCAGCCCCGCCCTGAATTTTGTGAG
CGACCGCGCTGGGCCGTTTCTCTTTCTTTTCCGGACCCTGCAGTGGCGCCTAAAGTCTGCGAGGAGGAAGTCGCCTC
TGTGCTCGTGAGTCCAGGGATCTAAGGCAAGTGCTGAGGGAGAAAACATAGTTGATGGGGCAGAGCAGAGGGGGCTG
GAGGTGGGGTGGAGGGGGAGGGCTTTGAACAGAAGACCTGGGAGGCTTGGTGGGGGAGGGGACCCAGGCCTCGGCGC
TGAGAAGCAACTCCCCTGGAGCTCAAGACCTTCTTGGCCTCCCCTAGCCCAGGGGAGGACTGGCTTCATGTCTCCCT
GAAACCGCTTCTAAATGCCTTAGAACAAACCTTAAATATTCATTATTATTATTGAACTATTAAAAGTCTTTTTTGGA
GGCGAGCTGAATGAGACCCTTTGCTGGAGCTGGCACACGGAGGAAGTCCTGGAGGGAGGGTAGACACCGTGGAGGGA
AGGGCTTGGGACCTGTGTCAGGAGAGCTGGGTCCATCTGCCTCTCTGTCTCAAACTATGCTTATGATCTTTAGCAGT
GAAAATAATCTCTCTAAGGTGGGGACAGGACCCCAGTCCCTGCTGTGCTTAATAAATTATGAGGATCAAAATAAATT
ATCAGTGAATGTGTATGGGAAGACTAAGAAATTGTTAAAATTCTCGAATACATTACATTTTCATCCACAGAAAAGTG
TAGGCTAGGGATGATAGGGGAATAGTTAGTAATGACAGGGATAGTTGAACTTAAAAAAAAAGGTTGTGAGGCCAACA
AAAAAGAAATGGACACAGTTCCTGATCCTGGAGGGTTCATAGTCTAATGGGGGAGGAGGGTAGAAGATGGTAGGTGA
TGGCTGGGTGTGTGGCACTCGCCTGTAGTCCCAGCTACTCAAGAGGCTGTGGTGGGAGGATTGCTTGAGCCCAGGCA
TTTGAGGCTGCAGTGAGCTATAATCACACCACTGCATTCCAACTGAGTGACACAGCAAGACTCCTCTCTTAAAAAAA
TAAAATAAAGTAAATGAAAAAAATAAGATTCAAGACAGGGCACAGTCGGTACCATCAGGAAGGTTCAAACCATGGGC
TAGATCAGTAGTTCTAAAACTTGACTACACATCGGAATCACGTAGGGAACTTTAAAAGATACTAAGGTTTAGGTCCA
ACCTAGGTTTACTGATTTAACTGGTTGTGGCTGTGGCCTGGGAACATGGATATTAAAAACTCTCCAGGTGGTTCTAC
GCAGTGGCTAGGTTTGAAGACCACTGCCTAGATGTCCCAATGACTAAGAATGTGCGCTGGGGACAAGCCAATTCTCT
TAGTAGAGGCTTTCCAGACAGAATTCTTATTATTGAGAATTGAGAATTCACATGCCACACATAATTTATCGTTTTAA
AGTGTACAGATCAGTGGCTTCTAGCATAATCACAAGGTTGTGCCACCGTCACCACTATCTACTTGGGAAGATTTTCT
TCCTTTTTTTCTTTTTTTTTTTTTTTTTTGAGGCGGAGCCTTGCTCTGTTGCCCAGGCTGGAGTGCAGTGGCGCAAT
CTCAGCTCACTGCAAGCTCCGCCTCCCGGGTTGACCCCATTCTCCTGCCTCAGCCTTCTGAGCAGCTGGGACTACAG
GTACCCGCCACCACGCCCAGCTAAGTTTTTTGTATTTTTAGTAGAGACGGGGTTTCACTGTGTTAGCAGGATGCTCT
CGATCTCCTGACCTCGTGATCTGCCCACCTCGACCTCCCAAAGTGCTGGGATTACAGGCGTGAGCCACCGTGCCCGG
ACCCTTTTTCCTTTTTTTTTTTTTTTAAAGGCTAGTCAAGTGAAACAGTGGGAGTGAAGATGAAACAAAAACATCTA
TAACTGGTTGTGATCAATTAGTTGTAAACACCACTGCACTCAGACCAGCCTAACTGGGAAGATTTTGAGGATATGCT
GTGGTCTGATGGGTTCCAAGGCAGAGGTGACAGTAACCTGGAAGAGGGAGACTGCTTAGGCAGTGGCATCCTGGTGG
GATAGGGTGAGGAGATCCCAGAGCCCACGTTTACTGCAACCCTGGGGAAATGTCACCAGAGAAATGGGGGTGGTGCC
AGACAATAGATTGTGGGAGCTATGGTTTCCATGGTAGAGTAGAAGCATCCACCATGTGTGACATTCAGCAGATGGGG
CGCTGTGGGTGGCTTGGAGCACTCTGGTTGTAACTGAGGCAGGCACAGTGTTTAGGAAGCCTGTGCAGTAATCCAGA
CTGAAGGGAGGGGAAAGCCTAGACTAAGACTATGGCTGTGGGATTGAAATAGCGTTGAAGGAGCTGACTTTGACTCC
CGGAGATGAAGGAGAAAGAGGAAATCAGAAGGGACCAAGGATGGTGAAGTTCTTAAGAGAAACTGAGGAGGAAGAGA
GGATGATGTGGTGGGAGACGTGTAGAGAGTCCTTGTAGATCTGTCATATTGAAGGGGACTATGGTCCCAGAGGTACA
GATGTCCTAAAACAGGCTGGAAAAGGGAGTCTGGAGAGAGCTTGGTGTTGTAATGAACCATGGGGAGCCGCCTCGTT
GGCCCTGTGATTACCCAGGAACTGAATAGAGAGGGGGCCCTGGGAGACCTCAGACACTTAGAGGATATAAGGGGGTG
AAAGGGGGGACCTGGCTTTGAGTCGAAGGGAGGAGAAGGAGATTATATAGCTGAAACGTCTAAGAGAATTTGTGATC
TGAGCGTTTCTACTGGGGCAAGTGCTTCTGAAAGGCAGAGGCGGCTGAGATCTGGAAACAGGTCTGCAAATCTGGTC
ACTGGTCTCATTGCAGTAACGCTGTGCGCGGTTGAGGGAGTGTATTGGGAGAAAAACCACGCGTTGTCTGTCCCGGA
AGGAACAAGCCAGTGAGAGCCGGCCTGATGGGAGGACCGGCGAAAGGGGCTTGGTGAAGCCCGCGCTCCTTGGGGGT
GGGAATGCGGGGATGGGGTGGTCGCGATGCAGGGAGGGCGACAGGGTCCAGGTCGTGCTCATAAGTTTGGAGCTGTA
CTCTCAGCTACTCGGGGCTGGTCCTTGATTTTGGCTGCGCTCGCGCACGCTCCCCCTTTTCTGGCCGCCAGGTCCCG
CCTTCTAAATTTCCCCAGGTCTCCAGGCCGCTAGAATTTTCTCTTCTGAACGTGGCCCCGCCCTCTCCACTCATGAT
TGGCCCTAAGTTCCGGGCCTCAGTTTTCACTGGATAAGCGGTCGCTGAGCGGGGCGCAGGTGACTAAATTTCGACGG
GGTCTTCTCACGGGTTTCATTCAGTTGGCCACTGCTGAGCAGCTGAGAAGGTGGCGACGTAGGGGCCATGGGGCTGG
GCCGGGTCCTGCTGTTTCTGGCCGTCGCCTTCCCTTTTGCACCCCCGGCAGCCGCCGCTGGTGAGTGGGGTTCCTGG
CGGTCCCCGGCGGAGCGGGAGCGGCGGGGCGTTTCCGGGGGTCCGGGTGGGTTGCCGCGAGCGCTGTGCGGTCAGGG
CGGGGCTCAGGTGTGCTGTCTGGAGTGCAGGGAGCTGGACGCCGCCTGTTCCCGCCACACCTCAGCCCTGCTTTCCC
ATCTCCCGTCTCTTTTTTTTTTTTTTTTTTTTTTTTTTTTTTTTTTTTTCTTTCTGAGACGGAGTCTCTGTCGCCTA
GGCTGTAGTGCAGTGGCGCGATCTTGGCTCACTGCAAGCGCCGCCTCCCGGGTTCACGCCATTCTCCTGCCTCAGCC
TCCCTAGTAGCTGGGACTACAGGCGCCCGCCACCACGCCCGGCTAATTTTTTGTGTTTTTAGTAGAGATGGGGTTTC
ACCGTGTTAGTCAGGATGGTCTCGATCTCCTGACCTCGTGATCCGCCCGCCTCGGCCTCCCAAAGTGCTGGGATTAC
AGGCGTGAGCCACCGCGCCCGACCTCCTGTCTCCTTTCAGTCCTCCTCGGGATCGCGCATCACCCGCATTTTCTGGT
CTCTCCTGCACTTGCTCTCCTCGCCTCTCCTCCGTCTCCTCTCACTTTTCGGACAAACCAGTCCTTCTGAGGCCCCT
GGGTTCCCGGGCTGCTCCTGTGAATGGCATTGGAAGGCCGTTCCAGCGCGGCCGCTGAGGCAGCCACTTCCCCCGGT
GCTGGGGGCGGATCTCAGGTCCCTGAAGTCCTGTCCTCTCCCGGAGCCGATGTGTTCTCAGCTCCTGGGCCGCAGCT
CCTGGAGTTGGGGCCCTCCTTTCTTGGGACCCGGAGGTGGTGCTTCTTGCTGCTGTGGGGACTGTGGGGGGTCCTGA
CTCTCAAGCTGAGGGGTTGGAGTCTGCAGGCTCCGGGCAGAGGATTCTTCCTGCGACTTCTGTCATCCCCAGCTCAT
TCTCCCCTCGCCTCCGGCTCCGGGGGTCCTCTCCTCTCTCGCATCCCACCCCTACTAATGACCAATGATCTAAGGAC
ACCAGATTCCCTCTCACCTCCTCCCTGCCCATCTTACGGCGCCCTGGGTCCTGTTGCTCTCCCAGCTCCCTGCTACC
CCTTCCTGTGTGCTGTTCTCTGATCCATTTCTAGGGTGTCCTCTGCCTTCATCCCCCGCCCCCGCCACTGAAGGTCC
CTCCTGCCTCCTTTATGGGCCTTTCCTGCAAGCAGCCTTCACTCCGTGCTGCCCCTATGCCTCCCCATTCCCAAATG
TCCCTGACTCTAACTTTCTGGTGCTGCCTTTTGTCCGGGGGGGTCTTCCCTCCATCCCACTCCCCTCCAGACCCCCA
AGGAGAGCCCTGATGCTAATGGCAGTTGGGCCTTAGGCAGGGCGCAGGGCAGCGCAGATGCCCCCTCCCCTCCAGTG
CAGGTGCCTGCTCTGGGCCCTGCCTCATTGTGGCCCCTTCCCCACTCCTTCATCCTCAGCCTCACCCTCTTGAGGAC
CCCACCCTCCAGCCCACAGGTGCTGGACCATCCCTCCCTGGTCCCTCCGCCCCTCTCCACCTTGGGACCTTGTGCTG
CTCCTATCTCTTGCCCAGCTGCCTGGGGCCCTCAGCAAGTTCTCATCTTTCAGTGGGAAAGTGGGAGTGCTGGAGCA
TATGACAGTGCTGAGAATCTTTCCCAAGCCCCACCCTCCCCCAGAGCACCCTCCCCTCCTGTCCTCACCCTACCCCA
AGTTCTCCCACAGTCACTCCTGCCCCATGCTCATGCCGCCCTCCAGTTCTTGCTCTGCCCATCTCCCCTCCCCAACC
CAGACCTAAAACAGGCTGTTGGGCCAGCTGTTCCTTGACCTTCCTTCTTTTCTTTTGGTTCCTTGACCCCAGTGGGC
TCTCACTCCCCACACCGCATATCTAAAATCTGTTTTGCCTGCTCTTGGGGTGCCACTGCTCCCCCTCCAGCATTACT
CCTTTTGGCAGGTCCTTCCTCAGGCTGAGAATCTCCCCCTCTACCTTGGTTTTCTCTCTCTGGCCAGCACCCCCACC
CCTTGCTTTGTTTTTAATTTTTAACTTTTGTTTGGGTACGTAGTAGATATGTATGTATATATTTATGGGGTACATGG
GATATTTTGACACAGGCCTACAATATGTCATAATCACATCAGGGTAAATGGGTTATCTATCACAACAAGCATTTATC
CTTTCTTTGTGCTACAAACAATCCCATTATGCTCTTTCAGTTATTTTTAAATGTACAATAAATTATTGTTGGCTGTA
CTCACCCTGCTGTGCTATCTACTAGATCTTATTCATTCTAACTATATTTTTGTACCCATTAACCATCCGCACTCCCC
CACTCCCCACTACCCTTCTCAGCCTCTGGTAGTCGTCATTCTATTGTCTCTCCCCATGAGGTCCATTGTTTTAATTT
TTGGCTGCCACAAATAAGTGAGAACATGCGAAGTTTGTCTCTCTGGGCCTGGGGCTTATTTCACTTCACATGATGAC
CTCCAGTTCTTTGCAAATGACATGATGGCTGAATAGTACTCCACATACACGTGTGCACCACATTTTCTTTCTCCATT
CGTCTGTTGATGGACACTTAGGTCGCTTGCAGATCTTGGCTATTTTGAATAGTGCTGCAATAAACATGGAAAAGTAG
ATAGCTCTTTAATATACCGATTTCCTTTCTTTTGGGTATATGCCTAACAGTGGGAGTGCTGGAGCATATGACAGCTC
TATTATATTTTTAGTTTTTGGAAGAACCTCCACATTATTTCCCACAGTGGTTATACTAGTTTACGTTCCCACCAACA
GTGTACAAGGGTTCTCTTTTGCTACATCCTCGCCAGGATTCCTTATTGCCTGTCTTCTGGATAAAAGCCAGTTTATC
TGGGGTGGGATGATATCTCGTAGGAGTTTTGATTTGCCTTCATCTGATGACGAATGATGTTGAGCACCTTTTGATAT
ACCTGTTTGCCATTTGTATGTCTTCTTTTGAGAAATGACTATTCAGATCTTTTGCTCATTTTTAAGTTGGATTATTA
GATATTTTTCCTATAGAGTTGTTTGAGATCCTTATATGTTTTGGTTACTAATCCTTTGTCAGATGAATAGTTTGAAA
ATATTTTCTCCCATTCTTGGATGGTCTCTTCACTTTGTTTATTGTTTCCTTTGCTGTGCAGAAGCTTTTTAACTTGA
TATGATCCCATTTATGCATTTTTACTTTGGTTGCCTCTGCTTGTGGGGTATTACTTAAAAAATCTTTGCCAGTCCAA
TATCTTAGAGAGTTTCCCCAATGTTTTCTTTCATAGTTTTCATAGTTTGAGGTCATAGATTTACATCTTTAATCCTT
TTTGATTGGATTTTTATATGTGGTGAGAGATAGGGTCCAGTTTCATTCTTCTGCATAAGGATATCTAGTTTCCCCAG
CACCATTTATTGAAGAGACTCTCCTTTGCCCTGTATGTGTTCTTGGTAACTTTGTTAGAAATAACTTCACTGTAGAT
ATATGGATTTGTTTCTGGGTTCTCTATTCTGTTTCATTGGTCCGTGTGTCTGTTTTTATGCCACTACCGTGCTGTTT
TGATTACTCTAGCTCTGTAGTATAATTTGAAGTCAGATAATGTGATTCCGCTAGTTTTGTTCTTTTTGCTCAGGGTA
GCTTTATCTATTCTGGGTTTTTTGTGATTCCATATACATTTTAGGATTGTTTTTCTATTTCTGTGAAGAATGTCATT
GGTGTTTTGATAGCAATTGCATTGAATTTGTAGATTGCTTTGGGTAGGATGGATATTTTAACAAAATTGATTCTTCC
GGCTGGGCACGGTGGCTCACTCCTGTAATCCCAGCACTTTGGGAGGCCGAGTCAGGTGGATCACTTGAGATCAGGAG
TTCAAGACCAGCCTGATCAACATGGGGAAACCCCGCCTCTACTAAAAATACAAAATTAGCCAGGCGTGGTGGCATAT
GCCTGTAATCCCAGCTACTCAGGAAAGCTGAGGCAGGAGAATCGCTTGAACCCAGGAGGCAGAGGTTGTGGTGAGCT
GAGATTGCACCATTGCACTCCAGCCTGGGCAACAGGAGCAAAACTCCATCTCAGAAAATAAAAATAAACATTGATTC
TTCCAGTCCGTGAACATGGAATGCCTTTTCCATTTTTTGTGTCCTCTTCAATGTTTTGCATCAGTGCTTTATAGTTT
TTATTGGAGAGATCTTTCACTTCTTCAGTTAAGTCTATTCCTAGGTATTTTATTTTATTTGTAGCTAATGAAAATGG
GATTCGTTTCTTGATTTCTTTTTCAGATTATTTGCTGTTAGCACATAGAAGTGCTATTGTTTTTTGCATGTTGATTT
TGTATCCTGCAACTTTACTGAATTTGTTCTTCAGTTCTAATAGTTTTTTGGTGGAGTCTTTAGGTTTTCCAAATATC
AGACCACATGATGTGCAAACAAGGATAATTTGACTTCTTCTTTTCCAATTTTGATGCCCTTTATTTCCTTCTCCTGT
CAGATTGCTCTAGCTAGGACTTGCAGTATTGTGTTGCATAACTGTAGTGAAAGTAGTCATCCTTGTCTTGTTCCAGA
TCTTAAAGAAAAGGCTTTCAGTTTTCCCCCATTCAGTATGTTACTAGCTGTGAGTTGTCATATATGGCTTTTGTTAT
ATTGAGGTCTGTTCCTTGTATACTCAGTTTTTTTAGAGTTTTTATCATGAAGGGATGTTAAACTTATCAAATGCTTT
TTCAGTATCAATTGAAATGGTGATATGGCTTTTGTCCTTTATTCTGTTGATACGATGTATTACATTGATTGATTTGT
GTATGCATACCTGGAATACATTCCACTTGGTCATGAAGAATGATCTTTTTAATATACTGTTGAATGTGGTTTGCTAG
TATTTCATTGATGATATTTGCCTCAATGTTCATCAGGGATATAGGCCTGTAGTTTTCTTTTTTTGATGTGTCTTTGC
CTGATTTTGATATCAGGATATTCCTGGCTTTGTAAAATGAGTTTGGAAGTATTCCCTCCTCCTCTGTTTTTCAGAAC
AATTTGAATAGGACTGATATTTCTTGTTCTTTAAACGTTTAATTGTGGTAAATTATACATTACATACATTTTACTGT
TTTAACCGCTTTTAAGTGTATACTCGGTGGCATTAGATACATTCACATTTTTGTGCAACCCAAAACTCTGTACCCAT
TAATCAGTAACTCCCCATTCCTCCCTACCTCTGGCCCCTGGTAACCATCATTCTACTTTTTGTTTCTATGAATTTGA
CCACTCTAGGTACCTCATTTAAGTAGAATCGTGTAATGTTTGTCTTTTTGATTCTGGCTTATTTCACTTATAATATT
TCGAGGTTCATCCAGGTTGTAGTATGGGTCAGATTTTCATTCCTTTTAATGATGAATAATACTCATTATATGTATGT
ACCACATCTTGGTTATCCATTCCTCAGACAATGGACACTTGGGTTACTTCTACCTTTTGGATATTGGCAAATATTTC
ATTTCTCTTGGGTATATATTTATTTCTTTTGAGTATTTCTTTTGGGTATATATCCAGAAATAGAATTGTTGGATCAT
ACGGTATTTCATTTTTTAATTTTTAGAGGAATCACCATAGTGTTTTCCATTGCAGGCGTGCCATTTTGTATTTCTAG
AAGCAGTATACAGGGGCTTCAGTTTCTCTACCTCCTTGCCAAACTTGCTGTGTGTGTGTGTGTGTGTGTGTGTGTGT
GTGTGTGTGATAATAGCCACCCTGATTGGTTTGAAGTGGTATCTCATTGTGGTTTGGATTTGCATTTTCCTAATGAG
TACTGATATTGAGCATCTTTTCATGTGTTTATTGATCATTTGTATATTTTCTTTGAAGAATTGGCCATTGAAGTCTT
GCCCATTTTTCTCCCCCACATAGCTTCTCATGGCTATTTTGCCCATTTTTGAGTGGGTTGACTGTTTTGTTGTTTTT
GTCAAACTTTTTTGCATATTCTGGAAACTAATCTCTCTCTTTTTCTTTTTTTTTTTTTTTTTTTTTTTGAGATGGAG
TCTTGCTCTGTTGCCCAGGCTGGAGTGCAGTGGCACGATCTCAGCTCACTGCAAGCTCCGCCCGCTAGCTTCATGCC
ATTCTCCCGCCTCAGCCTCCCGAGTAGCTGGGACTACAGGCGCCCGCCACCACACCCGGCTAATTTTTTGTATTTTT
AGTAGAGATAGGGTTTCACCATGTTAGCCAGGATGGTCTCAATCTCCTGACCTGGTGATACACCCGCCTCGGCCTCC
CAAAGTGCTGGAACTACAGGCTTGAGCCACCACGCCTGGCCTTCTGGAAACTAATCTCTTATCAGATATATGACTTG
CAATATTTATTTCATTTCAGGGGTTGATTGCTTTCTCACTCTGATTGTGCCCTTTGATGCACAGATATTTTGAATTT
TTCATGAGTCCAGTTTGTCAGTTCTTTCTATTCTATCTGTGCTTTGGCGTCATATCCATGAAAGCACTGTCAAACCC
TATGTCATGAACATTATACCCAATGTTTTTTTCTAAGATATTTTTATGTTTTAGTTCTTGAGTTTAGAGTTTAGGTC
TTTGATTCATTTTGAGTTAATTTTTGTATATAGTACAAATTAAGGGTCCAATTTTATATTATTTGAACATCCAGTTC
CCCCAGCACTATTTGCTGAAAAGATGGACTTACTCTTTGAGACCCTGTCACCTGCCCACCCCAGTGGACACTAGCTG
GTCCATCCAATTGCTGTCCTGGGGCCTTGTCATGCTACTCTTCCACTTTGGACCCAAGCCCACATCATTGCTCCCCT
CTGGGATACTGACCCCACTATAAACTTCACTGGGGCTACAACCTTCCTACCCCTTGTGCCTCATGACCACCCCCTCC
CTTGTCCCCACCATGCCCATGATGAGTCTTTTCTCAAGGCAGCTCGCCTTGCCTCCATCTCACCCTCACCTGTGCAC
CACAGCCACACTGGACATGGGTCCCTCTGAGCCTGAGTCCCTTCCCATTCCCACTGTCCCCTCTGGCAAGACCTTCC
TTCCAACACTGCCTTCATGCTCCTCCCTTGCCCCTGCAGGGCAGCCTCTCCCCTTGGCCCCTATTCCCTTAGGGGGC
TTGTGGCCACCCAGTCCTGGCACCTGACCTACAAGTTTGCCATCTTCATTCCCCCTTCTTCTGTTCATCAGCCCCCT
CCTCTATCCTCCCACCCTCACAGTTTTCCTTGTATATGAAATCTTCGTTCTTGTCCTTTTGCCCATGCGCATTTCCT
GCCTCCTCAGGGAGGTCGGGACAGCAGACCTGTGTGTTAAACATCAATGTGAAGTTATTTCCAGGAAGAAGTTTCAC
CTGTGATTTCCTCTTCCCCAGAGCCCCACAGTCTTCGTTACAACCTCATGGTGCTGTCCCAGGATGGATCTGTGCAG
TCAGGGTTTCTCGCTGAGGGACATCTGGATGGTCAGCCCTTCCTGCGCTATGACAGGCAGAAACGCAGGGCAAAGCC
CCAGGGACAGTGGGCAGAAAATGTCCTGGGAGCTAAGACCTGGGACACAGAGACCGAGGACTTGACAGAGAATGGGC
AAGACCTCAGGAGGACCCTGACTCATATCAAGGACCAGAAAGGAGGTGAGAGTCGGCAGGGGCAAGAGTAATGGGAG
GCCTTCTCCAGGAAAGTTGGAGACAGAGAGCAGGGACCTGTCTCTTCCCGCTGGATCTGGCTGGGGGTGGGGATGAG
GAATAGGGTCAGGGAGGCTCAGCAGGGTGGTGAGCCGGAACTCAGCCCACACAGGGAGGCATGGAGGAGGGCCAGGG
AGGGGTCGCTGCTGGGCTGAGTTCCTCACTTGGGTGGAAAGGTGATGGGTTCGGGAATGGAGAAGTCACTGCTGGGT
GGGGGCAGGCTTGCATTCCCTCCAGGAGATTAGGGTCTGTGAGATCCATGAAGACAGCAGCACCAGGGGCTCCCGGC
ATTTCTACTACGATGGGGAGCTCTTCCTCTCCCAAAACCTGGAGACTCAAGAATCGACAGTGCCCCAGTCCTCCAGA
GCTCAGACCTTGGCTATGAACGTCACAAATTTCTGGAAGGAAGATGCCATGAAGACCAAGACACACTATCGCGCTAT
GCAGGCAGACTGCCTGCAGAAACTACAGCGATATCTGAAATCCGGGGTGGCCATCAGGAGAACAGGTACCGACCCTG
GCCAGGGGCTCTACTGTTCCCGCAATTCTGCTAGAGTTGCCTCGCCTCCCAGCTCTGTCCGGGGAAACCCTCCCTGT
GCTATGGATGCAGGCGTTTCCTGTTGGCATATTGTGTCCTGATTTGCCTCTCCTGTTAGAGCCATTGGATAAAGACA
GTGGGTCTGGGACTGAACTGTCCAGTGTTGTAATCTGGGAAAGCAGTGGGCCCTCTGACAGAAGCCTGAGCCTGGTG
TGGGAGTTAGGCAGGAGAGGAAGCCCTCAGGGCCAGGGCTGCCCCCTCTGCCTCCCGGCCTGCCCATCCCGGAGAGT
TCCCTCCTGGCCCCATGACCCAGGAGTCCACCCTTGACATCCCCCTCCTCAGCATCAATGTGGGGATCCCAGAGCCT
GAGGCCACAGTCCCAAGGCCCATCCTCCTGCTAGCCTGGAGGAATTAGGCCCCAGGGTGAGGACAGACTTACAGAAG
GTCCGGTATCTGTGAGGGATTCAGCCAGAGTGAGAACAGTGGAGAGGAGCAGCCCTGTTCCCTGCATCTCCCTTAGA
GGGGAGCAGGGCTTCACTGGCTCTGCCCTTTCTTCTCCAGTGCCCCCCATGGTGAATGTCACCTGCAGCGAGGTCTC
AGAGGGCAACATCACCGTGACATGCAGGGCTTCCAGCTTCTATCCCCGGAATATCACACTGACCTGGCGTCAGGATG
GGGTATCTTTGAGCCACAACACCCAGCAGTGGGGGGATGTCCTGCCTGATGGGAATGGAACCTACCAGACCTGGGTG
GCCACCAGGATTCGCCAAGGAGAGGAGCAGAGGTTCACCTGCTACATGGAACACAGCGGGAATCACGGCACTCACCC
TGTGCCCTCTGGTGAGCCTGGGGTGACCCTGGAGAGGGTCAGGCCAGGGTAGGAACAGCAAGGACGGCTGTGGCTCT
CTGCCCAGTGTATAACAAGTCCCTTTTTTTCAGGGAAGGCGCTGGTGCTTCAGAGTCAACGGACAGACTTTCCATAT
GTTTCTGCTGCTATGCCATGTTTTGTTATTATTATTATTCTCTGTGTCCCTTGTTGCAAGAAGAAAACATCAGCGGC
AGAGGGTCCAGGTGAGAAAAGGGGACAGTTTCTGGAGATGGGAAAGCTCCTTTCTAGGCAGTAGGGTCTCCTCATTG
CTCCTGCCCAGACAAGACGTAGGTGACAAGGCTGCTGGGACAGGGGATGGAAGCTGGGGTATTTGGGAGGGGAATGG
GAGCTGCATCTCCATCTACACCCATAAGTGCTTCCCAAGCCAGGGCTGGGGCAAGGCCTTCGAATATCCAGCTGTGG
CCTCCTCCTGCTGCAAGTGAGGAGTGGGCAGCAGGGAGGGCTGTGGCACCTGCTCTGTCCCCATCCCAGCCTCTCTG
TCTCTCGGGCTCACTAGGGTGCGTCCAGGTGGGGTGAGTTGGGAATCACGTGCTGATTGCTGAGGGCCTGGATGATC
ATGGTGTCAGAGGGAGGAAATAGTAAAGGTGGCTGTGATCTGGGGAGGGCCAGAAACTGGAGAGGAATCCAAGGAGA
GGCGATGCCCACCCGTGTGCCTCCTCCAGGAGGCACTTTCCAGGTTCCCACTACCTGGCCTCCCTGAGTTTCCTTGC
AGATGACACAGATGAATAGATAAGCAGATGTCCCTGGGCCATTTGAGGAGCGGGGCCCAGCCCCTCATCAGGGCAGA
TGTGGTCCCTGTTTTCATCCTACCTCCAGCGTGTTTTCTTCTGCAGTCCCTGAGGGACACAGTCCCCAGGCGCCATC
TCTTTGAGGCTTTGTTCTGTGCTCTGTGGCCTTACCTTGCCCTCCCTGAGCCAATTTCCCTTTCTCAAGGTGGTCAC
TGCCTGGTAAGTTTGGAGTAAGGGACAGTCAGAAGCATTTCCCCCACAGTCAGGTTGTTTGATGGGAGATGAAAAGA
GACAGCAGAAGTTTTGTGTTTCTGCAAAAACAGAGGCAGTGCAGGGGACAGTGAGAGGCTGGGGTGTCCAGGAGACC
TGAGTCTGGCGGTAGGGGCGCTGGTTTCTCATCCTTGAACCTAGTTGCACTGTCAGTCGGCCCCTCATGCCTGAGCA
GATGGGAAGGTTCGTCCCCTGCCCTGCAGCAAGAGGGCCCCATCCAGGAGGCACCCACAGCAGGGGCAGTGCAGGTC
TGTGGTCACTCCTGCTCTCACCTGCGGCGTCTCCCGTGGAGGGATTGTCACTTCTGGTTCCCTGTGGGCAGGAATGG
TTTCCTCGTAGGTCACTGGGGTTTTGGCCAGGAAAAGGGTATGAAATTCATGTGCCAGTTTCTCAAAATTCCTGCTT
TCAATGTTGATGTCCAATAAAGATGTTCGTAATTTCAGCTCTATAATCTTAATAGGATTTCCTCTAATACTGCTGTT
GTAAAGCATATTAAATAAAACAGGAACTCAAATTTGGAGCCCCCTCTCCAGAAGGGTCTGTGTGGAGATGGTGGCTG
TGGCAGCGGCAGTTCCCAGGTGCAGAGGGTGGGCAGAGGCAGCCTCAGGCTAAGGGGTCTCCCCTACTCCACGTGGA
GAAAAGTCCTTGTAGGTTGCAAGGGCAGTGGCCTGGGTGGAATCCCTGCTAGGGACAGAGCAGGAAGGCCTCACAGC
CTCACCAAGCAGCAGCCCTGGGGTGAAGTAAGTGGACCAGGAGTAAGTGGACCAGGCAGGAGCAGTAGTGACTCAAC
AGCAGGTCACAGGCCTAGGTGGGTGCTGAAGGTCATGGGAGGCCAGGCCTCCTCGAGCAAGGTGGGGGGTCCCAGGG
TCAGGTCAGGTGCAGATCCTGTGGCAGCCACGTCTTTCCATGCTGGGCCTGCTGGGCCCCCCAGGCTTCCTGATGGG
GTCCCCAGTTAGGAGCTGCCTGCTCAGGGCTGGGAGGGGAGGAGTGCTGAGCTGCAGATAGAGGGCAGGGCCCACAG
TGGGCAGGGCCTGCCCTGGTGTGCAGGTGCCTCTGCAGGAGAGAAGGGCCTGGGGACTGAGAGCAAGGGTCAGGGCC
TCTCTTTGGGGAGGCCTCTCACTGTAACAGGACTGGTCAGGCCTGAGAGGAGGGCACTGGGTTCCCTCTTGGGTCTT
GTCCTTTTGTCTTGGGGCCCTTTCACTCCCTGCACGGTGAGTGGTGGGCACAGGACAGGGGCTGATGTTGATGGAGT
GATGGGAGAGAACTGACAGGGGCTGGGAAAAGCAAGGAGGGAGGAAGAAAAAAGTGGGGGCCTCATCTTCTCTCAGA
GAAAGGGCGAATCTGATTTTGGGGCAACTGAAGAGAGAAAAGTCCTTAGGGAATAAACACAACACTGCACCCAGTGG
AGCATTTACCCGTTTCCCTCTTCTCCAGAGCTTGTGAGCCTGCAGGTCCTGGATCAACACCCAGTTGGGACAGGAGA
CCACAGGGATGCAGCACAGCTGGGATTTCAGCCTCTGATGTCAGCTACTGGGTCCACTGGTTCCACTGAGGGCACCT
AGACTCTACAGCCAGGCGGCCAGGATTCAACTCCCTGCCTGGATCTCACCAGCACTTTCCCTCTGTTTCCTGACCTA
TGAAACAGAGAAAATAACATCACTTATTTATTGTTGTTGGATGCTGCAAAGTGTTAGTAGGTATGAGGTGTTTGCTG
CTCTGCCACGTAGAGAGCCAGCAAAGGGATCATGACCAACTCAACATTCCATTGGAGGCTATATGATCAAACAGCAA
ATTGTTTATCATGAATGCAGGATGTGGGCAAACTCACGACTGCTCCTGCCAACAGAAGGTTTGCTGAGGGCATTCAC
TCCATGGTGCTCATTGGAGTTATCTACTGGGTCATCTAGAGCCTATTGTTTGAGGAATGCAGTCTTACAAGCCTACT
CTGGACCCAGCAGCTGACTCCTTCTTCCACCCCTCTTCTTGCTATCTCCTATACCAATAAATACGAAGGGCTGTGGA
AGATCAGAGCCCTTGTTCACGAGAAGCAAGAAGCCCCCTGACCCCTTGTTCCAAATATACTCTTTTGTCTTTCTCTT
TATTCCCACGTTCGCCCTTTGTTCAGTCCAATACAGGGTTGTGGGGCCCTTAACAGTGCCATATTAATTGGTATCAT
TATTTCTGTTGTTTTTGTTTTTGTTTTTGTTTTTGTTTTTGAGACAGAGTCTCACTCTGTCACCCAGGCTGCAGTTC
ACTGGTGTGATCTCAGCTCACTGCAACCTCTGCCTCCCAGGTTCAAGCACTTCTCGTACCTCAGACTCCCGAATAGC
TGGGATTACAGACAGGCACCACCACACCCAGCTAATTTTTGTATTTTTTGTAGAGACGGGGTTTCGCCAAGTTGACC
AGCCCAGTTTCAAACTCCTGACCTCAGGTGATCTGCCTGCCTTGGCATCCCAAAGTGCTGGGATTACAAGAATGAGC
CACCGTGCCTGGCCTATTTTATTATATTGTAATATATTTTATTATATTAGCCACCATGCCTGTCCTATTTTCTTATG
TTTTAATATATTTTAATATATTACATGTGCAGTAATTAGATTATCATGGGTGAACTTTATGAGTGAGTATCTTGGTG
ATGACTCCTCCTGACCAGCCCAGGACCAGCTTTCTTGTCACCTTGAGGTCCCCTCGCCCCGTCACACCGTTATGCAT
TACTCTGTGTCTACTATTATGTGTGCATAATTTATACCGTAAATGTTTACTCTTTAAATAGA

| | |
|---|---|
| SEQ ID NO: 33 | MICB cDNA Sequence |

GAATTTTGTGAGCGACCGCGCTGGGCCGTTTCTCTTTCTTTTCCGGACCCTGCAGTGGCGCCTAAAGTCTGCGAGGA
GGAAGTCGCCTCTGTGCTCGTGAGTCCAGGGATCTAAGAGCCCCACAGTCTTCGTTACAACCTCATGGTGCTGTCCC
AGGATGGATCTGTGCAGTCAGGGTTTCTCGCTGAGGGACATCTGGATGGTCAGCCCTTCCTGCGCTATGACAGGCAG
AAACGCAGGGCAAAGCCCCAGGGACAGTGGGCAGAAAATGTCCTGGGAGCTAAGACCTGGGACACAGAGACCGAGGA
CTTGACAGAGAATGGGCAAGACCTCAGGAGGACCCTGACTCATATCAAGGACCAGAAAGGAGGCTTGCATTCCCTCC
AGGAGATTAGGGTCTGTGAGATCCATGAAGACAGCAGCACCAGGGGCTCCCGGCATTTCTACTACGATGGGGAGCTC
TTCCTCTCCCAAAACCTGGAGACTCAAGAATCGACAGTGCCCCAGTCCTCCAGAGCTCAGACCTTGGCTATGAACGT
CACAAATTTCTGGAAGGAAGATGCCATGAAGACCAAGACACACTATCGCGCTATGCAGGCAGACTGCCTGCAGAAAC
TACAGCGATATCTGAAATCCGGGGTGGCCATCAGGAGAACAGTGCCCCCCATGGTGAATGTCACCTGCAGCGAGGTC
TCAGAGGGCAACATCACCGTGACATGCAGGGCTTCCAGCTTCTATCCCCGGAATATCACACTGACCTGGCGTCAGGA
TGGGGTATCTTTGAGCCACAACACCCAGCAGTGGGGGGATGTCCTGCCTGATGGGAATGGAACCTACCAGACCTGGG
TGGCCACCAGGATTCGCCAAGGAGAGGAGCAGAGGTTCACCTGCTACATGGAACACAGCGGGAATCACGGCACTCAC
CCTGTGCCCTCTGGGAAGGCGCTGGTGCTTCAGAGTCAACGGACAGACTTTCCATATGTTTCTGCTGCTATGCCATG
TTTTGTTATTATTATTATTCTCTGTGTCCCTTGTTGCAAGAAGAAAACATCAGCGGCAGAGGGTCCAGAGCTTGTGA
GCCTGCAGGTCCTGGATCAACACCCAGTTGGGACAGGAGACCACAGGGATGCAGCACAGCTGGGATTTCAGCCTCTG
ATGTCAGCTACTGGGTCCACTGGTTCCACTGAGGGCACCTAGACTCTACAGCCAGGCGGCCAGGATTCAACTCCCTG
CCTGGATCTCACCAGCACTTTCCCTCTGTTTCCTGACCTATGAAACAGAGAAAATAACATCACTTATTTATTGTTGT
TGGATGCTGCAAAGTGTTAGTAGGTATGAGGTGTTTGCTGCTCTGCCACGTAGAGAGCCAGCAAAGGGATCATGACC
AACTCAACATTCCATTGGAGGCTATATGATCAAACAGCAAATTGTTTATCATGAATGCAGGATGTGGGCAAACTCAC
GACTGCTCCTGCCAACAGAAGGTTTGCTGAGGGCATTCACTCCATGGTGCTCATTGGAGTTATCTACTGGGTCATCT
AGAGCCTATTGTTTGAGGAATGCAGTCTTACAAGCCTACTCTGGACCCAGCAGCTGACTCCTTCTTCCACCCCTCTT
CTTGCTATCTCCTATACCAATAAATACGAAGGGCTGTGGAAGATCAGAGCCCTTGTTCACGAGAAGCAAGAAGCCCC
CTGACCCCTTGTTCCAAATATACTCTTTTGTCTTTCTCTTTATTCCCACGTTCGCCCTTTGTTCAGTCCAATACAGG
GTTGTGGGGCCCTTAACAGTGCCATATTAATTGGTATCATTATTTCTGTTGTTTTTGTTTTTGTTTTTGTTTTTGTT
TTTGAGACAGAGTCTCACTCTGTCACCCAGGCTGCAGTTCACTGGTGTGATCTCAGCTCACTGCAACCTCTGCCTCC
CAGGTTCAAGCACTTCTCGTACCTCAGACTCCCGAATAGCTGGGATTACAGACAGGCACCACCACACCCAGCTAATT
TTTGTATTTTTTGTAGAGACGGGGTTTCGCCAAGTTGACCAGCCCAGTTTCAAACTCCTGACCTCAGGTGATCTGCC
TGCCTTGGCATCCCAAAGTGCTGGGATTACAAGAATGAGCCACCGTGCCTGGCCTATTTTATTATATTGTAATATAT
TTTATTATATTAGCCACCATGCCTGTCCTATTTTCTTATGTTTTAATATATTTTAATATATTACATGTGCAGTAATT
AGATTATCATGGGTGAACTTTATGAGTGAGTATCTTGGTGATGACTCCTCCTGACCAGCCCAGGACCAGCTTTCTTG
TCACCTTGAGGTCCCCTCGCCCCGTCACACCGTTATGCATTACTCTGTGTCTACTATTATGTGTGCATAATTTATAC
CGTAAATGTTTACTCTTTAAATAGAAAAAAAAAAAAAAA

| | |
|---|---|
| SEQ ID NO: 34 | MICB Protein Sequence |

MVLSQDGSVQSGFLAEGHLDGQPFLRYDRQKRRAKPQGQWAENVLGAKTWDTETEDLTENGQDLRRTLTHIKDQKGG
LHSLQEIRVCEIHEDSSTRGSRHFYYDGELFLSQNLETQESTVPQSSRAQTLAMNVTNFWKEDAMKTKTHYRAMQAD
CLQKLQRYLKSGVAIRRTVPPMVNVTCSEVSEGNITVTCRASSFYPRNITLTWRQDGVSLSHNTQQWGDVLPDGNGT
YQTWVATRIRQGEEQRFTCYMEHSGNHGTHPVPSGKALVLQSQRTDFPYVSAAMPCFVIIIILCVPCCKKKTSAAEG
PELVSLQVLDQHPVGTGDHRDAAQLGFQPLMSATGSTGSTEGT

| | |
|---|---|
| SEQ ID NO: 37 | CD46 cDNA Sequence |

GGAACTCGGAGAGGTCTCCGCTAGGCTGGTGTCGGGTTACCTGCTCATCTTCCCGAAAATGATGGCGTTTTGCGCGC
TGCGCAAGGCACTTCCCTGCCGTCCCGAGAATCCCTTTTCTTCGAGGTGCTTCGTTGAGATTCTTTGGGTGTCGTTG
GCCCTAGTGTTCCTGCTTCCCATGCCCTCAGATGCCTGTGATGAGCCACCGAAGTTTGAAAGCATGCGGCCCCAATT
TTTGAATACCACTTACAGACCTGGAGACCGTGTAGAGTATGAATGTCGCCCCGGGTTCCAGCCCATGGTTCCTGCGC
TTCCCACCTTTTCCGTCTGTCAGGACGATAATACGTGGTCACCCCTCCAGGAGGCTTGTCGACGAAAAGCCTGTTCG
AATCTACCAGACCCGTTAAATGGCCAAGTTAGCTACCCAAATGGGGATATGCTGTTTGGTTCAAAGGCTCAGTTTAC
CTGTAACACTGGTTTTTACATAATTGGAGCCGAGACTGTGTATTGTCAGGTTTCTGGGAATGTTATGGCCTGGAGTG
AGCCCTCCCCGCTATGTGAGAAGATTTTGTGTAAACCACCTGGCGAAATTCCAAATGGAAAATACACCAATAGCCAT
AAGGATGTATTTGAATACAATGAAGTAGTAACTTACAGTTGTCTTTCTTCAACTGGACCGGATGAATTTTCACTTGT
TGGAGAGAGCAGCCTTTTTTGTATTGGGAAGGACGAGTGGAGTAGTGACCCCCCTGAGTGTAAAGTGGTCAAATGTC
CATATCCAGTAGTCCCAAATGGAGAAATTGTATCAGGATTTGGATCAAAATTTTACTACAAAGCAGAGGTTGTATTT
AAATGCAATGCTGGTTTTACCCTTCATGGCAGAGACACAATTGTCTGCGGTGCAAACAGCACGTGGGAGCCTGAGAT
GCCCCAATGTATCAAAGATTCCAAGCCTACTGATCCACCTGCAACCCCAGGACCAAGCCATCCAGGACCTCCCAGTC
CCAGTGATGCATCACCACCTAAAGATGCTGAGAGTTTAGATGGAGGAATCATCGCTGCAATTGTTGTGGGCGTCTTA
GCTGCCATTGCAGTAATTGCTGGTGGTGTATACTTTTTTCATCATAAATACAACAAGAAAAGGTCGAAGTAAAACTG
ATGTGCTTAAAGTAAAAGTTGCTGAGAGGACGTGGAATCCAGCCCCTTCCCTCTCCTGTGCTGCTGCCTGGGTCCCG
TTTTGCATGTCATGACTGTGTGCTTCCAAAAAATGCCTTTTGTTCGTATTTTTTTGCCTAAACGCATGATTTTGTCT
CTACTTGAATTAAATCATCACTGAATCCACGC

| | |
|---|---|
| SEQ ID NO: 38 | CD55 cDNA Sequence |

CGGCACGAGATTTCGTCTTAATCGCGGAGGTCGCAGAGTCCGGGAGCCGCTCGGGGTCCCCGTTCCCGCGCGCCATG
AGTCCCCTGCCGCGGAGCGCCCCCGCGGTGAGGCGCCTAATGGGCGGACAGACGCCGCCGCCGCTGCTGCTGCTGCT
GCTGCTGCTGTGTATCCCGGCTGCGCAGGGTGACTGCAGCCTTCCACCCGATGTACCTAATGCCCAACCAGATTTGC
GAGGTCTTGCAAGTTTTCCTGAACAAACCACAATAACATACAAATGTAACAAAGGCTTTGTCAAAGTTCCTGGCATG
GCAGACTCAGTGCTCTGTCTTAATGATAAATGGTCAGAAGTTGCAGAATTTTGTAATCGTAGCTGTGATGTTCCAAC
CAGGCTACATTTTGCATCTCTTAAAAAGTCTTACAGCAAACAGAATTATTTCCCAGAGGGTTTCACCGTGGAATATG
AGTGCCGTAAGGGCTATAAAAGGGATCTTACTCTATCAGAAAAACTAACTTGCCTTCAGAATTTTACGTGGTCCAAA
CCTGATGAATTTTGCAAAAAAAAACAATGTCCGACTCCTGGAGAACTAAAAAATGGTCATGTCAATATAACAACTGA
CTTGTTATTTGGCGCATCCATCTTTTTCTCATGTAACGCAGGGTACAGACTAGTTGGTGCAACTTCTAGTTACTGTT
TTGCCATAGCAAATGATGTTGAGTGGAGTGATCCATTGCCAGAATGCCAAGAAATTTCTCCAACTGTCAAAGCCATA
CCAGCTGTTGAGAAACCCATCACAGTAAATTTTCCAGCAACAAAGTATCCAGCTATTCCCAGGGCCACAACGAGTTT
TCATTCAAGTACATCTAAAAATCGAGGAAACCCTTCTTCAGGCATGAGAATCATGTCGTCTGGTACCATGCTACTTA
TTGCAGGAGGTGTTGCTGTTATTATAATAATTGTTGCCCTAATTCTAGCCAAAGGTTTCTGGCACTATGGAAAATCA
GGCTCTTACCACACTCATGAGAACAACAAAGCCGTTAATGTTGCATTTTATAATTTACCTGCGACTGGCGATGCCGC
AGATGTAAGACCTGGTAATTAACAAAAGGACGGTGCATGTGTAACACTGACAGTTTTGCTTATGGTGCTAGTAACCA
TTGGCTAGCTGACTTAGCCAAAGAAGAGTTAAGAAGAAAGTGCACACAAGTACACAGAATATTTTCAGTTTCTTAGA
ACTTTCAGGTGGAGTGGACATAGTTTGTGGATAGTGTTCTTCGTTTTGCATGTTTTCATTGTCTCTAAGGTACATAG
GAATGTCACAGAACCAAAGAGAAACAAATCTATCCTGAAATTACATCCTCAACACTCCTAAGACTCTTGAAAATAGA
ACAGCTCATAAGATTGAGAGCAATTACTTTCCAAAAAGGGTGAGAAAATGGAGAGATTTGTTCATGGTTAGAATATA
AGAAAAAAGAAAACAAAAAGGTGATTTTTCCCACCAAATGTGTAATGTTATTTTTATTAATAAAGGAAAAAAAAAAA
AAAAAA

| | |
|---|---|
| SEQ ID NO: 39 | CD59 cDNA Sequence |

GAAAAGACGCGCAGGCCGGGCCGCTCTCCCGACGGGGAGTAGCGCTGCAGCCGGACGCAGGGTGCAGTTAGAATCCA
TAGACGGTCACGATGGGAAGCAAAGGAGGGTTCATTTTGCTCTGGCTCCTGTCCATCCTGGCTGTTCTCTGCCACTT
AGGTCACAGCCTGCAGTGCTATAACTGTATCAACCCAGCTGGTAGCTGCACTACGGCCATGAATTGTTCACATAATC
AGGATGCCTGTATCTTCGTTGAAGCCGTGCCACCCAAAACTTACTACCAGTGTTGGAGGTTCGATGAATGCAATTTC
GATTTCATTTCGAGAAACCTAGCGGAGAAGAAGCTGAAGTACAACTGCTGCCGGAAGGACCTGTGTAACAAGAGTGA
TGCCACGATTTCATCAGGGAAAACCGCTCTGCTGGTGATCCTGCTGCTGGTAGCAACCTGGCACTTTTGTCTCTAAC
TGTACACCAGGAGAGTTTCTCCTCAACTTCCTCTGTCTCTCTGTTCCTATTTCCCATGCTGCGGTGTTCCAAAGGCT
GTGTATGCTCCAGCTTCTTCCTGTTGGGAAGGACTAAACCTAGCTTGAGCACTTTGGATTAGAGAGAGAAACTTTGA
GCGACTTTGAAGACCAGGCCTGTTGGCAGAGAAGACCTGTCAGAGGGGAAACGTTTTAAGAGTGAAGCACAGGTGAT
TTGAGCGAGGCCTATGCGTCTTCCTCTGCTCTTGGCAGGACCAGCTTTGCGGTAACCATTCGATAGATTCCACAATC
CTT

| | |
|---|---|
| SEQ ID NO: 40 | ICP47 cDNA Sequence |

TCAAGGGGCCAGCACGCGATCCTGCCGCTCGTTCGATCTAGCACACCCACGGGTCTGCTGTGTGGGATTTCGACTCG
CGGGATCCGATCGCACGTCCGGAGGACACAGCAGCGGGAGCTCCGGGTCGGTCACCGCAGTTCTGGCCGCCTCTCGG
TCCTCCCGTTCCCTTTTATGGATCTCCGCGCAGACATCGCCATACGTCCGGTGTGTGCACCGCGAAGAATCCAGAAA
CATGTCCGTCGTTTTCAGGGCCCAAGACAT

| | |
|---|---|
| SEQ ID NO: 41 | HLA-G1 cDNA Sequence |

AGTGTGGTACTTTGTCTTGAGGAGATGTCCTGGACTCACACGGAAACTTAGGGCTACGGAATGAAGTTCTCACTCCC
ATTAGGTGACAGGTTTTTAGAGAAGCCAATCAGCGTCGCCGCGGTCCTGGTTCTAAAGTCCTCGCTCACCCACCCGG
ACTCATTCTCCCCAGACGCCAAGGATGGTGGTCATGGCGCCCCGAACCCTCTTCCTGCTGCTCTCGGGGGCCCTGAC
CCTGACCGAGACCTGGGCGGGCTCCCACTCCATGAGGTATTTCAGCGCCGCCGTGTCCCGGCCCGGCCGCGGGGAGC
CCCGCTTCATCGCCATGGGCTACGTGGACGACACGCAGTTCGTGCGGTTCGACAGCGACTCGGCGTGTCCGAGGATG
GAGCCGCGGGCGCCGTGGGTGGAGCAGGAGGGGCCGGAGTATTGGGAAGAGGAGACACGGAACACCAAGGCCCACGC
ACAGACTGACAGAATGAACCTGCAGACCCTGCGCGGCTACTACAACCAGAGCGAGGCCAGTTCTCACACCCTCCAGT
GGATGATTGGCTGCGACCTGGGGTCCGACGGACGCCTCCTCCGCGGGTATGAACAGTATGCCTACGATGGCAAGGAT
TACCTCGCCCTGAACGAGGACCTGCGCTCCTGGACCGCAGCGGACACTGCGGCTCAGATCTCCAAGCGCAAGTGTGA
GGCGGCCAATGTGGCTGAACAAAGGAGAGCCTACCTGGAGGGCACGTGCGTGGAGTGGCTCCACAGATACCTGGAGA
ACGGGAAGGAGATGCTGCAGCGCGCGGACCCCCCCAAGACACACGTGACCCACCACCCTGTCTTTGACTATGAGGCC
ACCCTGAGGTGCTGGGCCCTGGGCTTCTACCCTGCGGAGATCATACTGACCTGGCAGCGGGATGGGGAGGACCAGAC
CCAGGACGTGGAGCTCGTGGAGACCAGGCCTGCAGGGGATGGAACCTTCCAGAAGTGGGCAGCTGTGGTGGTGCCTT
CTGGAGAGGAGCAGAGATACACGTGCCATGTGCAGCATGAGGGGCTGCCGGAGCCCCTCATGCTGAGATGGAAGCAG
TCTTCCCTGCCCACCATCCCCATCATGGGTATCGTTGCTGGCCTGGTTGTCCTTGCAGCTGTAGTCACTGGAGCTGC
GGTCGCTGCTGTGCTGTGGAGAAAGAAGAGCTCAGATTGAAAAGGAGGGAGCTACTCTCAGGCTGCAATGTGAAACA
GCTGCCCTGTGTGGGACTGAGTGGCAAGTCCCTTTGTGACTTCAAGAACCCTGACTCCTCTTTGTGCAGAGACCAGC
CCACCCCTGTGCCCACCATGACCCTCTTCCTCATGCTGAACTGCATTCCTTCCCCAATCACCTTTCCTGTTCCAGAA
AAGGGGCTGGGATGTCTCCGTCTCTGTCTCAAATTTGTGGTCCACTGAGCTATAACTTACTTCTGTATTAAAATTAG
AATCTGAGTATAAATTTACTTTTTCAAATTATTTCCAAGAGAGATTGATGGGTTAATTAAAGGAGAAGATTCCTGAA
ATTTGAGAGACAAAATAAATGGAAGACATGAGAACTTT

| | |
|---|---|
| SEQ ID NO: 42 | HLA-E cDNA Sequence |

GCAGACTCAGTTCTCATTCCCAATGGGTGTCGGGTTTCTAGAGAAGCCAATCAGCGTCGCCACGACTCCCGACTATA
AAGTCCCCATCCGGACTCAAGAAGTTCTCAGGACTCAGAGGCTGGGATCATGGTAGATGGAACCCTCCTTTTACTCC
TCTCGGAGGCCCTGGCCCTTACCCAGACCTGGGCGGGCTCCCACTCCTTGAAGTATTTCCACACTTCCGTGTCCCGG
CCCGGCCGCGGGGAGCCCCGCTTCATCTCTGTGGGCTACGTGGACGACACCCAGTTCGTGCGCTTCGACAACGACGC
CGCGAGTCCGAGGATGGTGCCGCGGGCGCCGTGGATGGAGCAGGAGGGGTCAGAGTATTGGGACCGGGAGACACGGA
GCGCCAGGGACACCGCACAGATTTTCCGAGTGAATCTGCGGACGCTGCGCGGCTACTACAATCAGAGCGAGGCCGGG
TCTCACACCCTGCAGTGGATGCATGGCTGCGAGCTGGGGCCCGACGGGCGCTTCCTCCGCGGGTATGAACAGTTCGC
CTACGACGGCAAGGATTATCTCACCCTGAATGAGGACCTGCGCTCCTGGACCGCGGTGGACACGGCGGCTCAGATCT
CCGAGCAAAAGTCAAATGATGCCTCTGAGGCGGAGCACCAGAGAGCCTACCTGGAAGACACATGCGTGGAGTGGCTC
CACAAATACCTGGAGAAGGGGAAGGAGACGCTGCTTCACCTGGAGCCCCCAAAGACACACGTGACTCACCACCCCAT
CTCTGACCATGAGGCCACCCTGAGGTGCTGGGCCCTGGGCTTCTACCCTGCGGAGATCACACTGACCTGGCAGCAGG
ATGGGGAGGGCCATACCCAGGACACGGAGCTCGTGGAGACCAGGCCTGCAGGGGATGGAACCTTCCAGAAGTGGGCA
GCTGTGGTGGTGCCTTCTGGAGAGGAGCAGAGATACACGTGCCATGTGCAGCATGAGGGGCTACCCGAGCCCGTCAC
CCTGAGATGGAAGCCGGCTTCCCAGCCCACCATCCCCATCGTGGGCATCATTGCTGGCCTGGTTCTCCTTGGATCTG
TGGTCTCTGGAGCTGTGGTTGCTGCTGTGATATGGAGGAAGAAGAGCTCAGGTGGAAAAGGAGGGAGCTACTCTAAG
GCTGAGTGGAGCGACAGTGCCCAGGGGTCTGAGTCTCACAGCTTGTAAAGCCTGAGACAGCTGCCTTGTGTGCGACT
GAGATGCACAGCTGCCTTGTGTGCGACTGAGATGCAGGATTTCCTCACGCCTCCCCTATGTGTCTTAGGGGACTCTG
GCTTCTCTTTTTGCAAGGGCCTCTGAATCTGTCTGTGTCCCTGTTAGCACAATGTGAGGAGGTAGAGAAACAGTCCA
CCTCTGTGTCTACCATGACCCCCTTCCTCACACTGACCTGTGTTCCTTCCCTGTTCTCTTTTCTATTAAAAATAAGA
ACCTGGGCAGAGTGCGGCAGCTCATGCCTGTAATCCCAGCACTTAGGGAGGCCGAGGAGGGCAGATCACGAGGTCAG
GAGATCGAAACCATCCTGGCTAACACGGTGAAACCCCGTCTCTACTAAAAAATACAAAAAATTAGCTGGGCGCAGAG
GCACGGGCCTGTAGTCCCAGCTACTCAGGAGGCGGAGGCAGGAGAATGGCGTCAACCCGGGAGGCGGAGGTTGCAGT
GAGCCAGGATTGTGCGACTGCACTCCAGCCTGGGTGACAGGGTGAAACGCCATCTCAAAAAATAAAAATTGAAAAAT
AAAAAAAGAACCTGGATCTCAATTTAATTTTTCATATTCTTGCAATGAAATGGACTTGAGGAAGCTAAGATCATAGC
TAGAAATACAGATAATTCCACAGCACATCTCTAGCAAATTTAGCCTATTCCTATTCTCTAGCCTATTCCTTACCACC
TGTAATCTTGACCATATACCTTGGAGTTGAATATTGTTTTCATACTGCTGTGGTTTGAATGTTCCCTCCAACACTCA
TGTTGAGACTTAATCCCTAATGTGGCAATACTGAAAGGTGGGGCCTTTGAGATGTGATTGGATCGTAAGGCTGTGCC
TTCATTCATGGGTTAATGGATTAATGGGTTATCACAGGAATGGGACTGGTGGCTTTATAAGAAGAGGAAAAGAGAAC
TGAGCTAGCATGCCCAGCCCACAGAGAGCCTCCACTAGAGTGATGCTAAGTGGAAATGTGAGGTGCAGCTGCCACAG
AGGGCCCCCACCAGGGAAATGTCTAGTGTCTAGTGGATCCAGGCCACAGGAGAGAGTGCCTTGTGGAGCGCTGGGAG
CAGGACCTGACCACCACCAGGACCCCAGAACTGTGGAGTCAGTGGCAGCATGCAGCGCCCCCTTGGGAAAGCTTTAG
GCACCAGCCTGCAACCCATTCGAGCAGCCACGTAGGCTGCACCCAGCAAAGCCACAGGCACGGGGCTACCTGAGGCC
TTGGGGGCCCAATCCCTGCTCCAGTGTGTCCGTGAGGCAGCACACGAAGTCAAAAGAGATTATTCTCTTCCCACAGA
TACCTTTTCTCTCCCATGACCCTTTAACAGCATCTGCTTCATTCCCCTCACCTTCCCAGGCTGATCTGAGGTAAACT
TTGAAGTAAAATAAAAGCTGTGTTTGAGCATCATTTGTATTTCAAAAAAAAAAAAAAAAAAAA

| | |
|---|---|
| SEQ ID NO: 43 | Human β-2-microglobulin cDNA Sequence |

AATATAAGTGGAGGCGTCGCGCTGGCGGGCATTCCTGAAGCTGACAGCATTCGGGCCGAGATGTCTCGCTCCGTGGC
CTTAGCTGTGCTCGCGCTACTCTCTCTTTCTGGCCTGGAGGCTATCCAGCGTACTCCAAAGATTCAGGTTTACTCAC
GTCATCCAGCAGAGAATGGAAAGTCAAATTTCCTGAATTGCTATGTGTCTGGGTTTCATCCATCCGACATTGAAGTT
GACTTACTGAAGAATGGAGAGAGAATTGAAAAAGTGGAGCATTCAGACTTGTCTTTCAGCAAGGACTGGTCTTTCTA
TCTCTTGTACTACACTGAATTCACCCCCACTGAAAAAGATGAGTATGCCTGCCGTGTGAACCATGTGACTTTGTCAC
AGCCCAAGATAGTTAAGTGGGATCGAGACATGTAAGCAGCATCATGGAGGTTTGAAGATGCCGCATTTGGATTGGAT
GAATTCCAAATTCTGCTTGCTTGCTTTTTAATATTGATATGCTTATACACTTACACTTTATGCACAAAATGTAGGGT
TATAATAATGTTAACATGGACATGATCTTCTTTATAATTCTACTTTGAGTGCTGTCTCCATGTTTGATGTATCTGAG
CAGGTTGCTCCACAGGTAGCTCTAGGAGGGCTGGCAACTTAGAGGTGGGGAGCAGAGAATTCTCTTATCCAACATCA
ACATCTTGGTCAGATTTGAACTCTTCAATCTCTTGCACTCAAAGCTTGTTAAGATAGTTAAGCGTGCATAAGTTAAC
TTCCAATTTACATACTCTGCTTAGAATTTGGGGGAAAATTTAGAAATATAATTGACAGGATTATTGGAAATTTGTTA
TAATGAATGAAACATTTTGTCATATAAGATTCATATTTACTTCTTATACATTTGATAAAGTAAGGCATGGTTGTGGT
TAATCTGGTTTATTTTTGTTCCACAAGTTAAATAAATCATAAAACTTGATGTGTTATCTCTTA

| | |
|---|---|
| SEQ ID NO: 44 | Human PD-L1 cDNA Sequence |

GGCGCAACGCTGAGCAGCTGGCGCGTCCCGCGCGGCCCCAGTTCTGCGCAGCTTCCCGAGGCTCCGCACCAGCCGCG
CTTCTGTCCGCCTGCAGGGCATTCCAGAAAGATGAGGATATTTGCTGTCTTTATATTCATGACCTACTGGCATTTGC
TGAACGCCCCATACAACAAAATCAACCAAAGAATTTTGGTTGTGGATCCAGTCACCTCTGAACATGAACTGACATGT
CAGGCTGAGGGCTACCCCAAGGCCGAAGTCATCTGGACAAGCAGTGACCATCAAGTCCTGAGTGGTAAGACCACCAC
CACCAATTCCAAGAGAGAGGAGAAGCTTTTCAATGTGACCAGCACACTGAGAATCAACACAACAACTAATGAGATTT
TCTACTGCACTTTTAGGAGATTAGATCCTGAGGAAAACCATACAGCTGAATTGGTCATCCCAGAACTACCTCTGGCA
CATCCTCCAAATGAAAGGACTCACTTGGTAATTCTGGGAGCCATCTTATTATGCCTTGGTGTAGCACTGACATTCAT
CTTCCGTTTAAGAAAAGGGAGAATGATGGATGTGAAAAAATGTGGCATCCAAGATACAAACTCAAAGAAGCAAAGTG
ATACACATTTGGAGGAGACGTAATCCAGCATTGGAACTTCTGATCTTCAAGCAGGGATTCTCAACCTGTGGTTTAGG
GGTTCATCGGGGCTGAGCGTGACAAGAGGAAGGAATGGGCCCGTGGGATGCAGGCAATGTGGGACTTAAAAGGCCCA
AGCACTGAAAATGGAACCTGGCGAAAGCAGAGGAGGAGAATGAAGAAAGATGGAGTCAAACAGGGAGCCTGGAGGGA
GACCTTGATACTTTCAAATGCCTGAGGGGCTCATCGACGCCTGTGACAGGGAGAAAGGATACTTCTGAACAAGGAGC
CTCCAAGCAAATCATCCATTGCTCATCCTAGGAAGACGGGTTGAGAATCCCTAATTTGAGGGTCAGTTCCTGCAGAA
GTGCCCTTTGCCTCCACTCAATGCCTCAATTTGTTTTCTGCATGACTGAGAGTCTCAGTGTTGGAACGGGACAGTAT
TTATGTATGAGTTTTTCCTATTTATTTTGAGTCTGTGAGGTCTTCTTGTCATGTGAGTGTGGTTGTGAATGATTTCT
TTTGAAGATATATTGTAGTAGATGTTACAATTTTGTCGCCAAACTAAACTTGCTGCTTAATGATTTGCTCACATCTA
GTAAAACATGGAGTATTTGTAAGGTGCTTGGTCTCCTCTATAACTACAAGTATACATTGGAAGCATAAAGATCAAAC
CGTTGGTTGCATAGGATGTCACCTTTATTTAACCCATTAATACTCTGGTTGACCTAATCTTATTCTCAGACCTCAAG
TGTCTGTGCAGTATCTGTTCCATTTAAATATCAGCTTTACAATTATGTGGTAGCCTACACACATAATCTCATTTCAT
CGCTGTAACCACCCTGTTGTGATAACCACTATTATTTTACCCATCGTACAGCTGAGGAAGCAAACAGATTAAGTAAC
TTGCCCAAACCAGTAAATAGCAGACCTCAGACTGCCACCCACTGTCCTTTTATAATACAATTTACAGCTATATTTTA
CTTTAAGCAATTCTTTTATTCAAAAACCATTTATTAAGTGCCCTTGCAATATCAATCGCTGTGCCAGGCATTGAATC
TACAGATGTGAGCAAGACAAAGTACCTGTCCTCAAGGAGCTCATAGTATAATGAGGAGATTAACAAGAAAATGTATT
ATTACAATTTAGTCCAGTGTCATAGCATAAGGATGATGCGAGGGGAAAACCCGAGCAGTGTTGCCAAGAGGAGGAAA
TAGGCCAATGTGGTCTGGGACGGTTGGATATACTTAAACATCTTAATAATCAGAGTAATTTTCATTTACAAAGAGAG
GTCGGTACTTAAAATAACCCTGAAAAATAACACTGGAATTCCTTTTCTAGCATTATATTTATTCCTGATTTGCCTTT
GCCATATAATCTAATGCTTGTTTATATAGTGTCTGGTATTGTTTAACAGTTCTGTCTTTTCTATTTAAATGCCACTA
AATTTTAAATTCATACCTTTCCATGATTCAAAATTCAAAAGATCCCATGGGAGATGGTTGGAAAATCTCCACTTCAT
CCTCCAAGCCATTCAAGTTTCCTTTCCAGAAGCAACTGCTACTGCCTTTCATTCATATGTTCTTCTAAAGATAGTCT
ACATTTGGAAATGTATGTTAAAAGCACGTATTTTTAAAATTTTTTTCCTAAATAGTAACACATTGTATGTCTGCTGT
GTACTTTGCTATTTTTATTTATTTTAGTGTTTCTTATATAGCAGATGGAATGAATTTGAAGTTCCCAGGGCTGAGGA
TCCATGCCTTCTTTGTTTCTAAGTTATCTTTCCCATAGCTTTTCATTATCTTTCATATGATCCAGTATATGTTAAAT
ATGTCCTACATATACATTTAGACAACCACCATTTGTTAAGTATTTGCTCTAGGACAGAGTTTGGATTTGTTTATGTT
TGCTCAAAAGGAGACCCATGGGCTCTCCAGGGTGCACTGAGTCAATCTAGTCCTAAAAAGCAATCTTATTATTAACT
CTGTATGACAGAATCATGTCTGGAACTTTTGTTTTCTGCTTTCTGTCAAGTATAAACTTCACTTTGATGCTGTACTT
GCAAAATCACATTTTCTTTCTGGAAATTCCGGCAGTGTACCTTGACTGCTAGCTACCCTGTGCCAGAAAAGCCTCAT
TCGTTGTGCTTGAACCCTTGAATGCCACCAGCTGTCATCACTACACAGCCCTCCTAAGAGGCTTCCTGGAGGTTTCG
AGATTCAGATGCCCTGGGAGATCCCAGAGTTTCCTTTCCCTCTTGGCCATATTCTGGTGTCAATGACAAGGAGTACC
TTGGCTTTGCCACATGTCAAGGCTGAAGAAACAGTGTCTCCAACAGAGCTCCTTGTGTTATCTGTTTGTACATGTGC
ATTTGTACAGTAATTGGTGTGACAGTGTTCTTTGTGTGAATTACAGGCAAGAATTGTGGCTGAGCAAGGCACATAGT
CTACTCAGTCTATTCCTAAGTCCTAACTCCTCCTTGTGGTGTTGGATTTGTAAGGCACTTTATCCCTTTTGTCTCAT
GTTTCATCGTAAATGGCATAGGCAGAGATGATACCTAATTCTGCATTTGATTGTCACTTTTTGTACCTGCATTAATT
TAATAAAATATTCTTATTTATTTTGTTACTTGGTACACCAGCATGTCCATTTTCTTGTTTATTTTGTGTTTAATAAA
ATGTTCAGTTTAACATCCCAGTGGAGAAAGTTAAAAAA

| | |
|---|---|
| SEQ ID NO: 45 | Human PD-L2 cDNA Sequence |

GCAAACCTTAAGCTGAATGAACAACTTTTCTTCTCTTGAATATATCTTAACGCCAAATTTTGAGTGCTTTTTTGTTA
CCCATCCTCATATGTCCCAGCTAGAAAGAATCCTGGGTTGGAGCTACTGCATGTTGATTGTTTTGTTTTTCCTTTTG
GCTGTTCATTTTGGTGGCTACTATAAGGAAATCTAACACAAACAGCAACTGTTTTTTGTTGTTTACTTTTGCATCTT
TACTTGTGGAGCTGTGGCAAGTCCTCATATCAAATACAGAACATGATCTTCCTCCTGCTAATGTTGAGCCTGGAATT
GCAGCTTCACCAGATAGCAGCTTTATTCACAGTGACAGTCCCTAAGGAACTGTACATAATAGAGCATGGCAGCAATG
TGACCCTGGAATGCAACTTTGACACTGGAAGTCATGTGAACCTTGGAGCAATAACAGCCAGTTTGCAAAAGGTGGAA
AATGATACATCCCCACACCGTGAAAGAGCCACTTTGCTGGAGGAGCAGCTGCCCCTAGGGAAGGCCTCGTTCCACAT
ACCTCAAGTCCAAGTGAGGGACGAAGGACAGTACCAATGCATAATCATCTATGGGGTCGCCTGGGACTACAAGTACC
TGACTCTGAAAGTCAAAGCTTCCTACAGGAAAATAAACACTCACATCCTAAAGGTTCCAGAAACAGATGAGGTAGAG
CTCACCTGCCAGGCTACAGGTTATCCTCTGGCAGAAGTATCCTGGCCAAACGTCAGCGTTCCTGCCAACACCAGCCA
CTCCAGGACCCCTGAAGGCCTCTACCAGGTCACCAGTGTTCTGCGCCTAAAGCCACCCCCTGGCAGAAACTTCAGCT
GTGTGTTCTGGAATACTCACGTGAGGGAACTTACTTTGGCCAGCATTGACCTTCAAAGTCAGATGGAACCCAGGACC
CATCCAACTTGGCTGCTTCACATTTTCATCCCCTTCTGCATCATTGCTTTCATTTTCATAGCCACAGTGATAGCCCT
AAGAAAACAACTCTGTCAAAAGCTGTATTCTTCAAAAGACACAACAAAAAGACCTGTCACCACAACAAAGAGGGAAG
TGAACAGTGCTATCTGAACCTGTGGTCTTGGGAGCCAGGGTGACCTGATATGACATCTAAAGAAGCTTCTGGACTCT
GAACAAGAATTCGGTGGCCTGCAGAGCTTGCCATTTGCACTTTTCAAATGCCTTTGGATGACCCAGCACTTTAATCT
GAAACCTGCAACAAGACTAGCCAACACCTGGCCATGAAACTTGCCCCTTCACTGATCTGGACTCACCTCTGGAGCCT
ATGGCTTTAAGCAAGCACTACTGCACTTTACAGAATTACCCCACTGGATCCTGGACCCACAGAATTCCTTCAGGATC
CTTCTTGCTGCCAGACTGAAAGCAAAAGGAATTATTTCCCCTCAAGTTTTCTAAGTGATTTCCAAAAGCAGAGGTGT
GTGGAAATTTCCAGTAACAGAAACAGATGGGTTGCCAATAGAGTTATTTTTTATCTATAGCTTCCTCTGGGTACTAG
AAGAGGCTATTGAGACTATGAGCTCACAGACAGGGCTTCGCACAAACTCAAATCATAATTGACATGTTTTATGGATT
ACTGGAATCTTGATAGCATAATGAAGTTGTTCTAATTAACAGAGAGCATTTAAATATACACTAAGTGCACAAATTGT
GGAGTAAAGTCATCAAGCTCTGTTTTTGAGGTCTAAGTCACAAAGCATTTGTTTTAACCTGTAATGGCACCATGTTT
AATGGTGGTTTTTTTTTTGAACTACATCTTTCCTTTAAAAATTATTGGTTTCTTTTTATTTGTTTTTACCTTAGAAA
TCAATTATATACAGTCAAAAATATTTGATATGCTCATACGTTGTATCTGCAGCAATTTCAGATAAGTAGCTAAAATG
GCCAAAGCCCCAAACTAAGCCTCCTTTTCTGGCCCTCAATATGACTTTAAATTTGACTTTTCAGTGCCTCAGTTTGC
ACATCTGTAATACAGCAATGCTAAGTAGTCAAGGCCTTTGATAATTGGCACTATGGAAATCCTGCAAGATCCCACTA
CATATGTGTGGAGCAGAAGGGTAACTCGGCTACAGTAACAGCTTAATTTTGTTAAATTTGTTCTTTATACTGGAGCC
ATGAAGCTCAGAGCATTAGCTGACCCTTGAACTATTCAAATGGGCACATTAGCTAGTATAACAGACTTACATAGGTG
GGCCTAAAGCAAGCTCCTTAACTGAGCAAAATTTGGGGCTTATGAGAATGAAAGGGTGTGAAATTGACTAACAGACA
AATCATACATCTCAGTTTCTCAATTCTCATGTAAATCAGAGAATGCCTTTAAAGAATAAAACTCAATTGTTATTCTT
CAACGTTCTTTATATATTCTACTTTTGGGTA

| | |
|---|---|
| SEQ ID NO: 46 | Human Spi9 cDNA Sequence |

AGCGGGAGTCCGCGGCGAGCGCAGCAGCAGGGCCGGGTCCTGCGCCTCGGGGGTCGGCGTCCAGGCTCGGAGCGCGG
CACGGAGACGGCGGCAGCGCTGGACTAGGTGGCAGGCCCTGCATCATGGAAACTCTTTCTAATGCAAGTGGTACTTT
TGCCATACGCCTTTTAAAGATACTGTGTCAAGATAACCCTTCGCACAACGTGTTCTGTTCTCCTGTGAGCATCTCCT
CTGCCCTGGCCATGGTTCTCCTAGGGGCAAAGGGAAACACCGCAACCCAGATGGCCCAGGCACTGTCTTTAAACACA
GAGGAAGACATTCATCGGGCTTTCCAGTCGCTTCTCACTGAAGTGAACAAGGCTGGCACACAGTACCTGCTGAGAAC
GGCCAACAGGCTCTTTGGAGAGAAAACTTGTCAGTTCCTCTCAACGTTTAAGGAATCCTGTCTTCAATTCTACCATG
CTGAGCTGAAGGAGCTTTCCTTTATCAGAGCTGCAGAAGAGTCCAGGAAACACATCAACACCTGGGTCTCAAAAAAG
ACCGAAGGTAAAATTGAAGAGTTGTTGCCGGGTAGCTCAATTGATGCAGAAACCAGGCTGGTTCTTGTCAATGCCAT
CTACTTCAAAGGAAAGTGGAATGAACCGTTTGACGAAACATACACAAGGGAAATGCCCTTTAAAATAAACCAGGAGG
AGCAAAGGCCAGTGCAGATGATGTATCAGGAGGCCACGTTTAAGCTCGCCCACGTGGGCGAGGTGCGCGCGCAGCTG
CTGGAGCTGCCCTACGCCAGGAAGGAGCTGAGCCTGCTGGTGCTGCTGCCTGACGACGGCGTGGAGCTCAGCACGGT
GGAAAAAAGTCTCACTTTTGAGAAACTCACAGCCTGGACCAAGCCAGACTGTATGAAGAGTACTGAGGTTGAAGTTC
TCCTTCCAAAATTTAAACTACAAGAGGATTATGACATGGAATCTGTGCTTCGGCATTTGGGAATTGTTGATGCCTTC
CAACAGGGCAAGGCTGACTTGTCGGCAATGTCAGCGGAGAGAGACCTGTGTCTGTCCAAGTTCGTGCACAAGAGTTT
TGTGGAGGTGAATGAAGAAGGCACCGAGGCAGCGGCAGCGTCGAGCTGCTTTGTAGTTGCAGAGTGCTGCATGGAAT
CTGGCCCCAGGTTCTGTGCTGACCACCCTTTCCTTTTCTTCATCAGGCACAACAGAGCCAACAGCATTCTGTTCTGT
GGCAGGTTCTCATCGCCATAAAGGGTGCACTTACCGTGCACTCGGCCATTTCCCTCTTCCTGTGTCCCCAGATCCCC
ACTACAGCTCCAAGAGGATGGGCCTAGAAAGCCAAGTGCAAAGATGAGGGCAGATTCTTTACCTGTCTGCCCTCATG
ATTTGCCAGCATGAATTCATGATGCTCCACACTCGCTTATGCTACTTAATCAGAATCTTGAGAAAATAGACCATAAT
GATTCCCTGTTGTATTAAAATTGCAGTCCAAATCCCATAGGATGGCAAGCAAAGTTCTTCTAGAATTCCACATGCAA
TTCACTCTGGCGACCCTGTGCTTTCCTGACACTGCGAATACATTCCTTAACCCGCTGCCTCAGTGGTAATAAATGGT
GCTAGATATTGCTACTATTTTATAGATTTCCTGGTGCTTAGCCTTATAAAAAAGGTTGTAAAATGTACATTTATATT
TTATCTTTTTTTTTTTTTTTTTTCTGAGACGCAGTCTGGCTCTCTGTCGCCCAGGCTGGAGTGCAGTGGCTCGATCT
CGGCTCACTGCAAGCTCCGCCTCCCGGGTTCACGCCATTCTCCTGCCTCAGCCTCCCGAGTAGCTGGGACTACAGGC
GCCCGCCACCACGCCCGGCTAATTTTTTGTATTTTTAGTAGAGACGGGGTTTCACCGTGTTAGCCAGGATGGTGTCG
ATCTCCTGACCTCGTGATCCACCCGCCTCGGCCTCCCAAAGTGCTGGGATTACAGGCTTGAGCCACCGCGCCCGGCT
ATATTTTATCTTTTATCTTTTTCTTTGACATTTACCAATCACCAAGCATGCACCAAACACTGCTTTAGGCACTGGGG
ACACAAAGGGGACAGAGCCATCCTCCTTTGACACCTGGTCTTCAGTTCTGTGCCCAACGTATATAGTTTTGACAATG
ACCAGGTTGGACTGTTTAATGTCTTTCAACTTACCACGTAATCCTCTTGTAGGGATCACATCTTTCTTTATGATATT
GTATTTCTCTACCTCTAACAGTAAAAATTCCATTCAACCCTTAAAGCTCACTTCAAATTCTTCTTTGAGAAGTTTTT
CCTTTCTCCGCAACCAGATGTACATATTTGAACTCTCTTTGTACTTGGAGGGCACTTCTTTCGTGGTAGTTCTTTTA
TTTTTATTAATCTCTGTATCCTTAGATAGTCCTCCAACAACCAAAGGTTGGGACTCTGTCTTACATATCTGGGTGCC
CCTCATAGTGCAGTAATAAGTAAGTTGATTATATACGAGCTATGTAACTTATATTTTTTAATGGTTGGATATCACTG
AGTTTTTTTTTTTAAGAATTTTTTTATTGAGGTAAACTTCACATAACATAAAATTAACTATTTTAAAGTGAGAAGTT
CAGTGCCACTTAGTATTGTTAACAATGTTGCATAACCACCACCTTTATTTAAAGTTCCAAAAAAAATGTTCTCCTCT
AAAAGGAAACCCCATCCCATTAAGCAGATACTCTCCATTCCTTCCTTCCTCCAGCCCCCAGCAACCACCAATCTGCT
TTCTGTCTCTATGGATTTATCTATTCTTGCTATTTTATATAAATTGAATTGTATGAGACCTTTTGTGTCTGGCTTCT
TTCACTTAGTACAAGTTTTTGAGATTTATTTACATAGTAGCATGTATCAACACTTCATTTTTATGGCCAAATAAAAT
TGTATTATGTGTTTATAGCACAATTTATTTATCCACTCATTCATTGATGGACTTTGGGTTGTTTCTGACTTTTGGCT
ATTGGGAATAGTGCTGCTATGAATGTTTGTGTACCTGTATTTGTTTGAATGCCTATTTTGCATTCTCTTGGGTATAT
ATCTAGGAGTGGAACTGCTGGGTCATATGTTAATTCTATGTTTAGCTTTTTGAGGAACAGACAAACTGTTTTCCACA
GCAGTTGAACCATTCCACATTCCCACCAGCAATGTATGAGAATTCCAATTTCTGTCCACTTCCTCACCAACACTTAT
TATTTTCCTTTTCCTTTTTTTAAAAAAAATAAGTTATGGCCATCTTAGTGGGTGTGAAGTGGTATCTCATTGTGTTT
TTTATTTGCATTTCCTATGTAATGAGCTAGAAACTAAAGTACAAACTAGATGGGACATCCAGTCCCTTTGATAGATA
ATGCTGAGTAAAAAATGAGATGAAAGACATTTGTTTGTTTTTAGAACACGAGTGACAGTTTGTTAAAAAGCTTTAGA
GGAGGAATGAAAACAAAGTGAAGTACACTTAGAAAAGGGCCAAGTGGACATCTTGGATGTCAAGTGCCTAGTTCAGT
ATCTTTTTTTTTTTTTTTTTTTTTTTTGAGACAGTGCCTCACTCTGTCACCCAGGCTGGAGTGTAGTGGCATGATCT
GGGCTCACTGCAACCTCCTCCTCCTGGATTCAAGCAATTCTCTTGCTTCAGCCTCCCAAGTAGCTGAGACTACAAGC
ACCCACCATCACACCCAGCTAATTTTGTATTTTTCAGTAGAGACGGGGTTTCGCCACATTGGCCGTGTTGGTCTTGA
ACTCCTGGCCTCAAGCGATCCGCCTACCTCAGCCTCCCAAAGTGCTAGGATTACAGGCATAAGCCACTGAGCCCAGC
CCTAGTTCAGTATCTTTTATGTAAATTACAAACATCTGCAACATTATGTATCATATGCAGATACTTATTGCATTTCT
TTTATTAGTGGTGAAAGTGTTCTATGCATTTATTGGCTCTTGAATTTCCTCATCTATGAATTGTCATTCATACACCT
ACTTTTCTGCTTCGTTTTTACATATGTCTTTGCCTATTAAAGATATTATCCCTCTGTTTTATATTTTCTCTCATTCT
TGTATTGCCTTTTAAATTTTGTTATGATGTTTCATTAATAAACAGTGTTTTGTTTTCCTCTATAATCAAAAAAAAAA
AAAAAAAAA

| | |
|---|---|
| SEQ ID NO: 47 | Human CD47 cDNA Sequence |

GGGGAGCAGGCGGGGGAGCGGGCGGGAAGCAGTGGGAGCGCGCGTGCGCGCGGCCGTGCAGCCTGGGCAGTGGGTCC
TGCCTGTGACGCGCGGCGGCGGTCGGTCCTGCCTGTAACGGCGGCGGCGGCTGCTGCTCCAGACACCTGCGGCGGCG
GCGGCGACCCCGCGGCGGGCGCGGAGATGTGGCCCCTGGTAGCGGCGCTGTTGCTGGGCTCGGCGTGCTGCGGATCA
GCTCAGCTACTATTTAATAAAACAAAATCTGTAGAATTCACGTTTTGTAATGACACTGTCGTCATTCCATGCTTTGT
TACTAATATGGAGGCACAAAACACTACTGAAGTATACGTAAAGTGGAAATTTAAAGGAAGAGATATTTACACCTTTG
ATGGAGCTCTAAACAAGTCCACTGTCCCCACTGACTTTAGTAGTGCAAAAATTGAAGTCTCACAATTACTAAAAGGA
GATGCCTCTTTGAAGATGGATAAGAGTGATGCTGTCTCACACACAGGAAACTACACTTGTGAAGTAACAGAATTAAC
CAGAGAAGGTGAAACGATCATCGAGCTAAAATATCGTGTTGTTTCATGGTTTTCTCCAAATGAAAATATTCTTATTG
TTATTTTCCCAATTTTTGCTATACTCCTGTTCTGGGGACAGTTTGGTATTAAAACACTTAAATATAGATCCGGTGGT
ATGGATGAGAAAACAATTGCTTTACTTGTTGCTGGACTAGTGATCACTGTCATTGTCATTGTTGGAGCCATTCTTTT
CGTCCCAGGTGAATATTCATTAAAGAATGCTACTGGCCTTGGTTTAATTGTGACTTCTACAGGGATATTAATATTAC
TTCACTACTATGTGTTTAGTACAGCGATTGGATTAACCTCCTTCGTCATTGCCATATTGGTTATTCAGGTGATAGCC
TATATCCTCGCTGTGGTTGGACTGAGTCTCTGTATTGCGGCGTGTATACCAATGCATGGCCCTCTTCTGATTTCAGG
TTTGAGTATCTTAGCTCTAGCACAATTACTTGGACTAGTTTATATGAAATTTGTGGCTTCCAATCAGAAGACTATAC
AACCTCCTAGGAAAGCTGTAGAGGAACCCCTTAATGCATTCAAAGAATCAAAAGGAATGATGAATGATGAATAACTG
AAGTGAAGTGATGGACTCCGATTTGGAGAGTAGTAAGACGTGAAAGGAATACACTTGTGTTTAAGCACCATGGCCTT
GATGATTCACTGTTGGGGAGAAGAAACAAGAAAAGTAACTGGTTGTCACCTATGAGACCCTTACGTGATTGTTAGTT
AAGTTTTTATTCAAAGCAGCTGTAATTTAGTTAATAAAATAATTATGATCTATGTTGTTTGCCCAATTGAGATCCAG
TTTTTTGTTGTTATTTTTAATCAATTAGGGGCAATAGTAGAATGGACAATTTCCAAGAATGATGCCTTTCAGGTCCT
AGGGCCTCTGGCCTCTAGGTAACCAGTTTAAATTGGTTCAGGGTGATAACTACTTAGCACTGCCCTGGTGATTACCC
AGAGATATCTATGAAAACCAGTGGCTTCCATCAAACCTTTGCCAACTCAGGTTCACAGCAGCTTTGGGCAGTTATGG
CAGTATGGCATTAGCTGAGAGGTGTCTGCCACTTCTGGGTCAATGGAATAATAAATTAAGTACAGGCAGGAATTTGG
TTGGGAGCATCTTGTATGATCTCCGTATGATGTGATATTGATGGAGATAGTGGTCCTCATTCTTGGGGGTTGCCATT
CCCACATTCCCCCTTCAACAAACAGTGTAACAGGTCCTTCCCAGATTTAGGGTACTTTTATTGATGGATATGTTTTC
CTTTTATTCACATAACCCCTTGAAACCCTGTCTTGTCCTCCTGTTACTTGCTTCTGCTGTACAAGATGTAGCACCTT
TTCTCCTCTTTGAACATGGTCTAGTGACACGGTAGCACCAGTTGCAGGAAGGAGCCAGACTTGTTCTCAGAGCACTG
TGTTCACACTTTTCAGCAAAAATAGCTATGGTTGTAACATATGTATTCCCTTCCTCTGATTTGAAGGCAAAAATCTA
CAGTGTTTCTTCACTTCTTTTCTGATCTGGGGCATGAAAAAAGCAAGATTGAAATTTGAACTATGAGTCTCCTGCAT
GGCAACAAAATGTGTGTCACCATCAGGCCAACAGGCCAGCCCTTGAATGGGGATTTATTACTGTTGTATCTATGTTG
CATGATAAACATTCATCACCTTCCTCCTGTAGTCCTGCCTCGTACTCCCCTTCCCCTATGATTGAAAAGTAAACAAA
ACCCACATTTCCTATCCTGGTTAGAAGAAAATTAATGTTCTGACAGTTGTGATCGCCTGGAGTACTTTTAGACTTTT
AGCATTCGTTTTTTACCTGTTTGTGGATGTGTGTTTGTATGTGCATACGTATGAGATAGGCACATGCATCTTCTGTA
TGGACAAAGGTGGGGTACCTACAGGAGAGCAAAGGTTAATTTTGTGCTTTTAGTAAAAACATTTAAATACAAAGTTC
TTTATTGGGTGGAATTATATTTGATGCAAATATTTGATCACTTAAAACTTTTAAAACTTCTAGGTAATTTGCCACGC
TTTTTGACTGCTCACCAATACCCTGTAAAAATACGTAATTCTTCCTGTTTGTGTAATAAGATATTCATATTTGTAGT
TGCATTAATAATAGTTATTTCTTAGTCCATCAGATGTTCCCGTGTGCCTCTTTTATGCCAAATTGATTGTCATATTT
CATGTTGGGACCAAGTAGTTTGCCCATGGCAAACCTAAATTTATGACCTGCTGAGGCCTCTCAGAAAACTGAGCATA
CTAGCAAGACAGCTCTTCTTGAAAAAAAAAATATGTATACACAAATATATACGTATATCTATATATACGTATGTATA
TACACACATGTATATTCTTCCTTGATTGTGTAGCTGTCCAAAATAATAACATATATAGAGGGAGCTGTATTCCTTTA
TACAAATCTGATGGCTCCTGCAGCACTTTTTCCTTCTGAAAATATTTACATTTTGCTAACCTAGTTTGTTACTTTAA
AAATCAGTTTTGATGAAAGGAGGGAAAAGCAGATGGACTTGAAAAAGATCCAAGCTCCTATTAGAAAAGGTATGAAA
ATCTTTATAGTAAAATTTTTTATAAACTAAAGTTGTACCTTTTAATATGTAGTAAACTCTCATTTATTTGGGGTTCG
CTCTTGGATCTCATCCATCCATTGTGTTCTCTTTAATGCTGCCTGCCTTTTGAGGCATTCACTGCCCTAGACAATGC
CACCAGAGATAGTGGGGGAAATGCCAGATGAAACCAACTCTTGCTCTCACTAGTTGTCAGCTTCTCTGGATAAGTGA
CCACAGAAGCAGGAGTCCTCCTGCTTGGGCATCATTGGGCCAGTTCCTTCTCTTTAAATCAGATTTGTAATGGCTCC
CAAATTCCATCACATCACATTTAAATTGCAGACAGTGTTTTGCACATCATGTATCTGTTTTGTCCCATAATATGCTT
TTTACTCCCTGATCCCAGTTTCTGCTGTTGACTCTTCCATTCAGTTTTATTTATTGTGTGTTCTCACAGTGACACCA
TTTGTCCTTTTCTGCAACAACCTTTCCAGCTACTTTTGCCAAATTCTATTTGTCTTCTCCTTCAAAACATTCTCCTT
TGCAGTTCCTCTTCATCTGTGTAGCTGCTCTTTTGTCTCTTAACTTACCATTCCTATAGTACTTTATGCATCTCTGC
TTAGTTCTATTAGTTTTTTGGCCTTGCTCTTCTCCTTGATTTTAAAATTCCTTCTATAGCTAGAGCTTTTCTTTCTT
TCATTCTCTCTTCCTGCAGTGTTTTGCATACATCAGAAGCTAGGTACATAAGTTAAATGATTGAGAGTTGGCTGTAT
TTAGATTTATCACTTTTTAATAGGGTGAGCTTGAGAGTTTTCTTTCTTTCTGTTTTTTTTTTTTGTTTTTTTTTTTT
TTTTTTTTTTTTTTTTTTTTGACTAATTTCACATGCTCTAAAAACCTTCAAAGGTGATTATTTTTCTCCTGGAAACT
CCAGGTCCATTCTGTTTAAATCCCTAAGAATGTCAGAATTAAAATAACAGGGCTATCCCGTAATTGGAAATATTTCT
TTTTTCAGGATGCTATAGTCAATTTAGTAAGTGACCACCAAATTGTTATTTGCACTAACAAAGCTCAAAACACGATA
AGTTTACTCCTCCATCTCAGTAATAAAAATTAAGCTGTAATCAACCTTCTAGGTTTCTCTTGTCTTAAAATGGGTAT
TCAAAAATGGGGATCTGTGGTGTATGTATGGAAACACATACTCCTTAATTTACCTGTTGTTGGAAACTGGAGAAATG
ATTGTCGGGCAACCGTTTATTTTTTATTGTATTTTATTTGGTTGAGGGATTTTTTTATAAACAGTTTTACTTGTGTC
ATATTTTAAAATTACTAACTGCCATCACCTGCTGGGGTCCTTTGTTAGGTCATTTTCAGTGACTAATAGGGATAATC
CAGGTAACTTTGAAGAGATGAGCAGTGAGTGACCAGGCAGTTTTTCTGCCTTTAGCTTTGACAGTTCTTAATTAAGA
TCATTGAAGACCAGCTTTCTCATAAATTTCTCTTTTTGAAAAAAAGAAAGCATTTGTACTAAGCTCCTCTGTAAGAC
AACATCTTAAATCTTAAAAGTGTTGTTATCATGACTGGTGAGAGAAGAAAACATTTTGTTTTTATTAAATGGAGCAT
TATTTACAAAAAGCCATTGTTGAGAATTAGATCCCACATCGTATAAATATCTATTAACCATTCTAAATAAAGAGAAC
TCCAGTGTTGCTATGTGCAAGATCCTCTCTTGGAGCTTTTTTGCATAGCAATTAAAGGTGTGCTATTTGTCAGTAGC
CATTTTTTTGCAGTGATTTGAAGACCAAAGTTGTTTTACAGCTGTGTTACCGTTAAAGGTTTTTTTTTTTATATGTA
TTAAATCAATTTATCACTGTTTAAAGCTTTGAATATCTGCAATCTTTGCCAAGGTACTTTTTTATTTAAAAAAAAAC
ATAACTTTGTAAATATTACCCTGTAATATTATATATACTTAATAAAACATTTTAAGCTATTTTGTTGGGCTATTTCT
ATTGCTGCTACAGCAGACCACAAGCACATTTCTGAAAAATTTAATTTATTAATGTATTTTTAAGTTGCTTATATTCT
AGGTAACAATGTAAAGAATGATTTAAAATATTAATTATGAATTTTTTGAGTATAATACCCAATAAGCTTTTAATTAG
AGCAGAGTTTTAATTAAAAGTTTTAAATCAGTC

| | |
|---|---|
| SEQ ID NO: 48 | Human galectin-9 cDNA Sequence |

TCCCCATTGAATAACAGCCAAGTTGCTTTGGTTTCTATTTCTTTGTTAAGTCGTTCCCTCTACAAAGGACTTCCTAG
TGGGTGTGAAAGGCAGCGGTGGCCACAGAGGCGGCGGAGAGATGGCCTTCAGCGGTTCCCAGGCTCCCTACCTGAGT
CCAGCTGTCCCCTTTTCTGGGACTATTCAAGGAGGTCTCCAGGACGGACTTCAGATCACTGTCAATGGGACCGTTCT
CAGCTCCAGTGGAACCAGGTTTGCTGTGAACTTTCAGACTGGCTTCAGTGGAAATGACATTGCCTTCCACTTCAACC
CTCGGTTTGAAGATGGAGGGTACGTGGTGTGCAACACGAGGCAGAACGGAAGCTGGGGGCCCGAGGAGAGGAAGACA
CACATGCCTTTCCAGAAGGGGATGCCCTTTGACCTCTGCTTCCTGGTGCAGAGCTCAGATTTCAAGGTGATGGTGAA
CGGGATCCTCTTCGTGCAGTACTTCCACCGCGTGCCCTTCCACCGTGTGGACACCATCTCCGTCAATGGCTCTGTGC
AGCTGTCCTACATCAGCTTCCAGAACCCCCGCACAGTCCCTGTTCAGCCTGCCTTCTCCACGGTGCCGTTCTCCCAG
CCTGTCTGTTTCCCACCCAGGCCCAGGGGGCGCAGACAAAAACCTCCCGGCGTGTGGCCTGCCAACCCGGCTCCCAT
TACCCAGACAGTCATCCACACAGTGCAGAGCGCCCCTGGACAGATGTTCTCTACTCCCGCCATCCCACCTATGATGT
ACCCCCACCCCGCCTATCCGATGCCTTTCATCACCACCATTCTGGGAGGGCTGTACCCATCCAAGTCCATCCTCCTG
TCAGGCACTGTCCTGCCCAGTGCTCAGAGGTTCCACATCAACCTGTGCTCTGGGAACCACATCGCCTTCCACCTGAA
CCCCCGTTTTGATGAGAATGCTGTGGTCCGCAACACCCAGATCGACAACTCCTGGGGGTCTGAGGAGCGAAGTCTGC
CCCGAAAAATGCCCTTCGTCCGTGGCCAGAGCTTCTCAGTGTGGATCTTGTGTGAAGCTCACTGCCTCAAGGTGGCC
GTGGATGGTCAGCACCTGTTTGAATACTACCATCGCCTGAGGAACCTGCCCACCATCAACAGACTGGAAGTGGGGGG
CGACATCCAGCTGACCCATGTGCAGACATAGGCGGCTTCCTGGCCCTGGGGCCGGGGGCTGGGGTGTGGGGCAGTCT
GGGTCCTCTCATCATCCCCACTTCCCAGGCCCAGCCTTTCCAACCCTGCCTGGGATCTGGGCTTTAATGCAGAGGCC
ATGTCCTTGTCTGGTCCTGCTTCTGGCTACAGCCACCCTGGAACGGAGAAGGCAGCTGACGGGGATTGCCTTCCTCA
GCCGCAGCAGCACCTGGGGCTCCAGCTGCTGGAATCCTACCATCCCAGGAGGCAGGCACAGCCAGGGAGAGGGGAGG
AGTGGGCAGTGAAGATGAAGCCCCATGCTCAGTCCCCTCCCATCCCCCACGCAGCTCCACCCCAGTCCCAAGCCACC
AGCTGTCTGCTCCTGGTGGGAGGTGGCCTCCTCAGCCCCTCCTCTCTGACCTTTAACCTCACTCTCACCTTGCACCG
TGCACCAACCCTTCACCCCTCCTGGAAAGCAGGCCTGATGGCTTCCCACTGGCCTCCACCACCTGACCAGAGTGTTC
TCTTCAGAGGACTGGCTCCTTTCCCAGTGTCCTTAAAATAAAGAAATGAAAATGCTTGTTGGCACATTCAAAAAAAA
AAAAAAAAAAAAAAAAAAAAAAAAAAAAAAAAAAAAAAAAAAAAAAAAAAAAAAAAAAAAAAAA

| | |
|---|---|
| SEQ ID NO: 49 | CD46 Protein Sequence |

MMAFCALRKALPCRPENPFSSRCFVEILWVSLALVFLLPMPSDACDEPPKFESMRPQFLNTTYRPGDRVEYECRPGF
QPMVPALPTFSVCQDDNTWSPLQEACRRKACSNLPDPLNGQVSYPNGDMLFGSKAQFTCNTGFYIIGAETVYCQVSG
NVMAWSEPSPLCEKILCKPPGEIPNGKYTNSHKDVFEYNEVVTYSCLSSTGPDEFSLVGESSLFCIGKDEWSSDPPE
CKVVKCPYPVVPNGEIVSGFGSKFYYKAEVVFKCNAGFTLHGRDTIVCGANSTWEPEMPQCIKDSKPTDPPATPGPS
HPGPPSPSDASPPKDAESLDGGIIAAIVVGVLAAIAVIAGGVYFFHHKYNKKRSK

| | |
|---|---|
| SEQ ID NO: 50 | CD55 Protein Sequence |

MSPLPRSAPAVRRLMGGQTPPPLLLLLLLLCIPAAQGDCSLPPDVPNAQPDLRGLASFPEQTTITYKCNKGFVKVPG
MADSVLCLNDKWSEVAEFCNRSCDVPTRLHFASLKKSYSKQNYFPEGFTVEYECRKGYKRDLTLSEKLTCLQNFTWS
KPDEFCKKKQCPTPGELKNGHVNITTDLLFGASIFFSCNAGYRLVGATSSYCFAIANDVEWSDPLPECQEISPTVKA
IPAVEKPITVNFPATKYPAIPRATTSFHSSTSKNRGNPSSGMRIMSSGTMLLIAGGVAVIIIIVALILAKGFWHYGK
SGSYHTHENNKAVNVAFYNLPATGDAADVRPGN

| | |
|---|---|
| SEQ ID NO: 51 | CD59 Protein Sequence |

MGSKGGFILLWLLSILAVLCHLGHSLQCYNCINPAGSCTTAMNCSHNQDACIFVEAVPPKTYYQCWRFDECNFDFIS
RNLAEKKLKYNCCRKDLCNKSDATISSGKTALLVILLLVATWHFCL

| | |
|---|---|
| SEQ ID NO: 52 | ICP47 Protein Sequence |

MSWALKTTDMFLDSSRCTHRTYGDVCAEIHKREREDREAARTAVTDPELPLLCPPDVRSDPASRNPTQQTRGCARSN
ERQDRVLAP

| | |
|---|---|
| SEQ ID NO: 53 | HLA-G1 Protein Sequence |

MVVMAPRTLFLLLSGALTLTETWAGSHSMRYFSAAVSRPGRGEPRFIAMGYVDDTQFVRFDSDSACPRMEPRAPWVE
QEGPEYWEEETRNTKAHAQTDRMNLQTLRGYYNQSEASSHTLQWMIGCDLGSDGRLLRGYEQYAYDGKDYLALNEDL
RSWTAADTAAQISKRKCEAANVAEQRRAYLEGTCVEWLHRYLENGKEMLQRADPPKTHVTHHPVFDYEATLRCWALG
FYPAEIILTWQRDGEDQTQDVELVETRPAGDGTFQKWAAVVVPSGEEQRYTCHVQHEGLPEPLMLRWKQSSLPTIPI
MGIVAGLVVLAAVVTGAAVAAVLWRKKSSD

| | |
|---|---|
| SEQ ID NO: 54 | HLA-E Protein Sequence |

MVDGTLLLLLSEALALTQTWAGSHSLKYFHTSVSRPGRGEPRFISVGYVDDTQFVRFDNDAASPRMVPRAPWMEQEG
SEYWDRETRSARDTAQIFRVNLRTLRGYYNQSEAGSHTLQWMHGCELGPDGRFLRGYEQFAYDGKDYLTLNEDLRSW
TAVDTAAQISEQKSNDASEAEHQRAYLEDTCVEWLHKYLEKGKETLLHLEPPKTHVTHHPISDHEATLRCWALGFYP
AEITLTWQQDGEGHTQDTELVETRPAGDGTFQKWAAVVVPSGEEQRYTCHVQHEGLPEPVTLRWKPASQPTIPIVGI
IAGLVLLGSVVSGAVVAAVIWRKKSSGGKGGSYSKAEWSDSAQGSESHSL

| | |
|---|---|
| SEQ ID NO: 55 | Human β-2-microglobulin Protein Sequence |

MSRSVALAVLALLSLSGLEAIQRTPKIQVYSRHPAENGKSNFLNCYVSGFHPSDIEVDLLKNGERIEKVEHSDLSFS
KDWSFYLLYYTEFTPTEKDEYACRVNHVTLSQPKIVKWDRDM

| | |
|---|---|
| SEQ ID NO: 56 | Human PD-L1 Protein Sequence |

MRIFAVFIFMTYWHLLNAPYNKINQRILVVDPVTSEHELTCQAEGYPKAEVIWTSSDHQVLSGKTTTTNSKREEKLF
NVTSTLRINTTTNEIFYCTFRRLDPEENHTAELVIPELPLAHPPNERTHLVILGAILLCLGVALTFIFRLRKGRMMD
VKKCGIQDTNSKKQSDTHLEET

| | |
|---|---|
| SEQ ID NO: 57 | Human PD-L2 Protein Sequence |

MIFLLLMLSLELQLHQIAALFTVTVPKELYIIEHGSNVTLECNFDTGSHVNLGAITASLQKVENDTSPHRERATLLE
EQLPLGKASFHIPQVQVRDEGQYQCIIIYGVAWDYKYLTLKVKASYRKINTHILKVPETDEVELTCQATGYPLAEVS
WPNVSVPANTSHSRTPEGLYQVTSVLRLKPPPGRNFSCVFWNTHVRELTLASIDLQSQMEPRTHPTWLLHIFIPFCI
IAFIFIATVIALRKQLCQKLYSSKDTTKRPVTTTKREVNSAI

| | |
|---|---|
| SEQ ID NO: 58 | Human Spi9 Protein Sequence |

METLSNASGTFAIRLLKILCQDNPSHNVFCSPVSISSALAMVLLGAKGNTATQMAQALSLNTEEDIHRAFQSLLTEV
NKAGTQYLLRTANRLFGEKTCQFLSTFKESCLQFYHAELKELSFIRAAEESRKHINTWVSKKTEGKIEELLPGSSID
AETRLVLVNAIYFKGKWNEPFDETYTREMPFKINQEEQRPVQMMYQEATFKLAHVGEVRAQLLELPYARKELSLLVL
LPDDGVELSTVEKSLTFEKLTAWTKPDCMKSTEVEVLLPKFKLQEDYDMESVLRHLGIVDAFQQGKADLSAMSAERD
LCLSKFVHKSFVEVNEEGTEAAAASSCFVVAECCMESGPRFCADHPFLFFIRHNRANSILFCGRFSSP

| | |
|---|---|
| SEQ ID NO: 59 | Human CD47 Protein Sequence |

MWPLVAALLLGSACCGSAQLLFNKTKSVEFTFCNDTVVIPCFVTNMEAQNTTEVYVKWKFKGRDIYTFDGALNKSTV
PTDFSSAKIEVSQLLKGDASLKMDKSDAVSHTGNYTCEVTELTREGETIIELKYRVVSWFSPNENILIVIFPIFAIL
LFWGQFGIKTLKYRSGGMDEKTIALLVAGLVITVIVIVGAILFVPGEYSLKNATGLGLIVTSTGILILLHYYVFSTA
IGLTSFVIAILVIQVIAYILAVVGLSLCIAACIPMHGPLLISGLSILALAQLLGLVYMKFVASNQKTIQPPRKAVEE
PLNAFKESKGMMNDE

| | |
|---|---|
| SEQ ID NO: 60 | Human galectin-9 Protein Sequence |

MAFSGSQAPYLSPAVPFSGTIQGGLQDGLQITVNGTVLSSSGTRFAVNFQTGFSGNDIAFHFNPRFEDGGYVVCNTR
QNGSWGPEERKTHMPFQKGMPFDLCFLVQSSDFKVMVNGILFVQYFHRVPFHRVDTISVNGSVQLSYISFQNPRTVP
VQPAFSTVPFSQPVCFPPRPRGRRQKPPGVWPANPAPITQTVIHTVQSAPGQMFSTPAIPPMMYPHPAYPMPFITTI
LGGLYPSKSILLSGTVLPSAQRFHINLCSGNHIAFHLNPRFDENAVVRNTQIDNSWGSEERSLPRKMPFVRGQSFSV
WILCEAHCLKVAVDGQHLFEYYHRLRNLPTINRLEVGGDIQLTHVQT

[0674] While some embodiments have been shown and described herein, such embodiments are provided by way of example only. Numerous variations, changes, and substitutions will now occur to those skilled in the art without departing from the invention. It should be understood that various alternatives to the embodiments of the invention described herein will be employed in practicing the invention.

1.-147. (canceled)

148. A genetically modified non-human animal comprising an exogenous nucleic acid sequence at least 95% identical to SEQ ID NO: 359 or SEQ ID NO: 502.

149. The genetically modified non-human animal of claim 148, wherein the exogenous nucleic acid sequence is at least 96% identical to SEQ ID NO: 359 or SEQ ID NO: 502.

150. The genetically modified non-human animal of claim 148, wherein the exogenous nucleic acid sequence is at least 99% identical to SEQ ID NO: 359 or SEQ ID NO: 502.

151. The genetically modified non-human animal of claim 148, wherein the exogenous nucleic acid is 100% identical to SEQ ID NO: 0.359.

152. The genetically modified non-human animal of claim 148, wherein the exogenous nucleic acid is 100% identical to SEQ ID NO: 502.

153. The genetically modified non-human animal of claim 148, further comprising an exogenous nucleic acid sequence that encodes for a β-2-microglobulin (B2M) protein.

154. The genetically modified non-human animal of claim 148, further comprising an exogenous nucleic acid sequence that encodes for a β-2-microglobulin (B2M) protein, wherein the B2M protein is fused to a protein encoded by the exogenous nucleic acid sequence that is at least 95% identical to SEQ ID NO: 359 or SEQ ID NO: 502.

155. (canceled)

156. The genetically modified non-human animal of claim 148, wherein the exogenous nucleic acid sequence is inserted in the genetically modified non-human animal's genome at a site effective to reduce expression of a glycoprotein galactosyltransferase alpha 1,3 (GGTA1), a putative cytidine monophosphate-N-acetylneuraminic acid hydroxylase-like protein (CMAH), a β1,4 N-acetylgalactosaminyltransferase (B4GALNT2), a C—X—C motif chemokine 10 (CXCL10), a MEC class I polypeptide-related sequence A (MICA), a MEC class I polypeptide-related sequence B (WEB), a transporter associated with antigen processing 1 (TAP1), a NOD-like receptor family CARD domain containing 5 (NLRC5), or a combination thereof, in comparison to: a non-human animal of the same species without the exogenous nucleic acid sequence, or a non-human animal of the same species with the exogenous nucleic acid inserted in a different site.

157. A genetically modified non-human cell, tissue, or organ comprising an exogenous nucleic acid sequence at least 95% identical to SEQ ID NO: 359 or SEQ ID NO: 502.

158. The genetically modified non-human cell, tissue, or organ of claim 157, wherein the exogenous nucleic acid sequence is at least 96% identical to SEQ ID NO: 359 or SEQ ID NO: 502.

159. The genetically modified non-human cell, tissue, or organ of claim 157, wherein the exogenous nucleic acid sequence is at least 99% identical to SEQ ID NO: 359 or SEQ ID NO: 502.

160. The genetically modified non-human cell, tissue, or organ of claim 157, wherein the exogenous nucleic acid sequence is 100% identical to SEQ ID NO: 359.

161. The genetically modified non-human cell, tissue, or organ of claim 157, wherein the exogenous nucleic acid sequence is 100% identical to SEQ ID NO: 502.

162. The genetically modified non-human cell, tissue, or organ of claim 157, further comprising an exogenous nucleic acid sequence that encodes for a β-2-microglobulin (B2M) protein.

163. The genetically modified non-human cell, tissue, or organ of claim 157, further comprising an exogenous nucleic acid sequence that encodes for a β-2-microglobulin (B2M) protein-, wherein the B2M protein is fused to a protein encoded by the exogenous nucleic acid sequence that is at least 95% identical to SEQ ID NO: 359 or SEQ ID NO: 502.

164. The genetically modified non-human cell, tissue, or organ of claim 157, wherein the exogenous nucleic acid sequence is inserted in the genetically modified non-human cell, tissue, or organ's genome at a site effective to reduce expression of a glycoprotein galactosyltransferase alpha 1,3 (GGTA1), a putative cytidine monophosphate-N-acetylneuraminic acid hydroxylase-like protein (CMAH), a β1,4 N-acetylgalactosaminyltransferase (B4GALNT2), a C—X—C motif chemokine 10 (CXCL10), a MHC class I polypeptide-related sequence A (MICA), a MHC class I polypeptide-related sequence B (MICB), a transporter associated with antigen processing 1 (TAP1), a NOD-like receptor family CARD domain containing 5 (NLRC5), or a combination thereof, in comparison to: a genetically modified non-human cell, tissue, or organ of the same species without the exogenous nucleic acid sequence or a genetically modified non-human cell, tissue, or organ with the exogenous nucleic acid inserted in a different site.

165. The genetically modified non-human cell, tissue, or organ of claim 157, wherein the genetically modified non-human cell is an islet cell.

166. The genetically modified non-human cell, tissue, or organ of claim 157, wherein the genetically modified non-human cell is a stem cell.

167. The genetically modified non-human cell, tissue, or organ of claim 157, wherein the genetically modified non-human tissue is a solid organ transplant.

168. The genetically modified non-human cell, tissue, or organ of claim 157, wherein the genetically modified non-human tissue is all or a portion of a liver.

169. The genetically modified non-human cell, tissue, or organ of claim 157, wherein the genetically modified non-human tissue is all or a portion of a kidney.

170. A method comprising providing to a subject, the genetically modified non-human cell, tissue or organ of claim 157.

171. The method of claim 170, further comprising providing to the subject a tolerizing vaccine.

172. The method of claim 170, further comprising providing to the subject an anti-CD40 agent.

173. A method of making a genetically modified pig comprising:
a) obtaining a porcine fetal fibroblast cell comprising—an exogenous nucleic acid sequence at least 95% identical to SEQ ID NO: 359 or SEQ ID NO: 502;
b) genetically modifying said porcine fetal fibroblast cell using clustered regularly interspaced short palindromic repeats (CRISPR)/Cas by (i) disrupting a gene encoding a glycoprotein galactosyltransferase alpha 1,3 (GGTA1) in the porcine fetal fibroblast cell comprising the exogenous nucleic acid sequence, or (ii) inserting the exogenous nucleic acid sequence at least 95% identical to SEQ ID NO: 359 or SEQ ID NO: 502 in the porcine fetal fibroblast cell comprising the disrupted gene encoding the GGTA1;
c) transferring a nucleus of the genetically modified porcine fetal fibroblast cell to a porcine enucleated oocyte to generate an embryo; and
d) transferring the embryo into a surrogate pig and growing the transferred embryo to the genetically modified pig in the surrogate pig.

174. The genetically modified non-human animal of claim 148, wherein the non-human animal is a pig.

175. The genetically modified non-human cell, tissue, or organ of claim 157, wherein the non-human cell, tissue or organ is a pig cell, tissue or organ, respectively.

The application's sequence listing, which the Patent Office published only in electronic form, follows.

SEQUENCE LISTING (512 sequences)

SEQ ID NO: 1 - DNA, 20 bp, Artificial Sequence
  Description of Artificial Sequence: Synthetic primer
gctgtggcatatggcagttc

SEQ ID NO: 2 - DNA, 19 bp, Artificial Sequence
  Description of Artificial Sequence: Synthetic primer
tccatgtataagtctttta

SEQ ID NO: 3 - DNA, 20 bp, Artificial Sequence
  Description of Artificial Sequence: Synthetic primer
ggcaatgccagatcctcaac

SEQ ID NO: 4 - DNA, 20 bp, Artificial Sequence
  Description of Artificial Sequence: Synthetic primer
tgtctgatgtctttctcatg

SEQ ID NO: 5 - DNA, 2662 bp, Sus scrofa
  modified_base (616)..(715): a, c, t, g, unknown or other
  modified_base (800)..(899): a, c, t, g, unknown or other
  modified_base (1792)..(1792): a, c, t, g, unknown or other
tggaaacaacatgaacactgtgagctcccgggagttcagtcagatccactgaggtagtggccgggtccagcggccttgcctaacttggcagtccccacccgctgcatccttagatctggctttgtcccttacacaggacagcccaggcctgtgatccccaaggtcaggctaacgctacctggacctgggctctaagacctgggaagctacaggaggggtgagccagttcccagattgggaaaactgaggcttgaggcgagaggatagtcatccacaagcctcgtggctaaatccctggcttggcccagggccctggacctcaggccactgggctgatcagtgcttgtatgctttcctcatcgcacttgtttggaagacattccctggtttagctgctctgggatggtaatctataaatacatactttgtttaaaaaattaataaattaaatcttggaccagcatgagggcatctggccagccacatggcatatgacatggacatttgccacgtctcaaatatggactgcccatcacatgtagtgctaggacccatgccaacaacccacaggccacactgcaggtttcatgcaatgtcacatggaacgctgccacgnnnnnnnnnnnnnnnnnnnnnnnnnnnnnnnnnnnnnnnnnnnnnnnnnnnnnnnnnnnnnnnnnnnnnnnnnnnnnnnnnnnnnnnnnnnnnnnnnnnntcacgccacgacatcctcactgtgctgcatattcccgactggtcatgcatgtcatgtgtgatggagggtggtctgttggccatannnnnnnnnnnnnnnnnnnnnnnnnnnnnnnnnnnnnnnnnnnnnnnnnnnnnnnnnnnnnnnnnnnnnnnnnnnnnnnnnnnnnnnnnnnnnnnnnnnntctgaagaccgtgcctggaaaacggcgtctctccctcccggaacagtgtgccgggacagccagctgaggctcttttcctgagccctctatcctgggggatggaagcggacatcacttggctgtattggaagggtcttgcgggggccgtcaagcatcccaggggacctgtggctgatggtcgaagaaagcaaagtccagcctgggctcccggctctgcagatgctgggccgtgtcctgggggatggggttattccacaggctgcggggcacagagacagacattcagcactgggagctgttcacttgtccttgtctctaccctctgtccaacccacagatggggaaactgaggccccaaaggggaagagctgttcccagagttacctggcaggtaggagcaggtgttagaccagcatggctaccttagggagatggtatcccccatgcccaccccaacttcttccactcactcttcttccctggaagctagtgatgccagctgggccatgctcatatgacacattgtgcaaataaggagaaagcccccccctttatttctttttgttttttttttttttaccatttcttgggccgctcccgcggcatatggagattcccaggctaggggtcgaatcggagctgtagccgccagcctacgccagagccacagcaactcgggatccgagctgcatctgcgacctgcaccacagctcatggcaacgccggatcgttaacccactgagcagggccagggatcgaacccgcaacctcatggttcctagttggattcattaaccactgtgccacgatgggaactctgaaagctccccctttttagacactttatttctatcttctgaaactgtcatactgagttttatagagcgagaccnccccctttttaagacactttatttctatcttctgaaactgtcgtaatatactgagttttatagagcgagacccttcactactaccagaaacctaacacgtcaacggtgtgaacagtgtcctttagatgcaaggccttggtacagtgtgcagcctgtgcaactgtacgtggtggctgtgattacagttatcattttaagcacttgctatgtgccaggcattgtactcagtgctttgtagaatcatttagtctgcagagcgcccatctaaggctgatatgatcattgtctccagtttacaaatgaggaaaccgaggttcagggaggttgagttactgaggcaaagttacacagtcagcaaccagtagagctgggatttgatccaggtctgctggctgccacattcctggtggagtgggccaaatctcctttgataatccccaatccaggagttcctgttgtggcgcagcagaaatgaatccgactagtaaccataaggttgcaggttcaatccctggtcttgctcagtgggttaaggatctggcgttgctatgagctgtggtgtaggttgaagatgcacctcagatcccacaatgctgtggctatggcgtaggctggcggatgtagctctgattggacccctagcctgggaatctccatatgctgcaggtgcggccctaaaaaagcaataaataagtaaatagataaccctcaacccaggtcctgcctcctcctacagaaagttcctttgcattgtagaggctgctgtggcccccacctcccaccatcctcgcccctgcaagtcctgttaccgaatgacttggatgccagagccctgagccagcccttcagccaggagccaggctccatgag

SEQ ID NO: 6 - DNA, 6638 bp, Sus scrofa
gggcctgtcctatggaaagaacctgcaagtccagcacaggggcttggccgggaacccatgagaccccctctggggacatcctaggacatctgtgatgaatcaggaagcagggctggctcctcatggaccccattagtcgccacctgggcaccaagaacctgtggggatggctcgtgaggctgctctgcaaacactcagaatggctgagtgccaaggtgaagttcttcctccccaacatggacctgggtgccaggaacgaggcctcagaccccacacagagggtcgtcctacaactcagaaaactgcgtacccagagtcagatcacctggcaggcgttcatccactgtgtgtgcatggagctggacgtgccgctggacctggaggtactgctgctgagcacctggggccacggagaagggctccccagtcagctggaagctgatgaggagcacccacctgagtctcagccccactctggcctcaagcggccacatcagagctgtgggccctcccctcgcccaaagcagtgcaggaagcagcagcgagaactggccaagaggtacctgcagctgctgagaacgtttgcccagcagcgttacgacagcaggagccctgggccaggacagccggtcgcctgccaccgaacctacatcccgcccatcttgcaatggaaccgagcctctgtgcccttcgacactcaggaggggactgttgcagggggccccaaggcagaagatggcacggatgtgagcattcgggacctcttcagtgccaaagccaacaagggcccgagagtcacggtgcttctgggaaaggcgggcatgggcaagaccacgctggcccaccggctctgccaagagtgggccgatggtcagctggagcgcttccaggccctgttccttttcgaattccgccagctcaacctgatcacaaacttcctgatgctgccacagctcctttttgatctgtacctgaggcccgaggcgggcccagaggcagtcttccagtacctggaggagaatgctaataaaatcctgctcatctttgatgggctggacgaggtcctccaccccggctccagcaaggaggctgcagatcctgaggcctcggcgtcagccctcaccctcttctcccgcctctgccatgggaccctcctgcccggctgctgggtcatgaccacctcccgtccagggaagctgcccgcctgcctgcccacagaggtggtcacggtcagcatgtggggctttgacggaccacgggtggaggagtacgtgagccgcttcttcagcgaccagccagtccaggaggcggccctcgcggagctgcgggccagctggcatctctggagcatgtgtgtggtgcccgcgctgtgccaggtcgcctgcctctgcctccaccatctgctcccaggccgctctccaggccagtctgcagccctcctgcccaccgtgacccagagctacgtgcagatggtgctttccctcagcccccaagggttcctgcctgccgagtccctgatgggcctcggggaggtggccctgtggggcctggagacggggaaggttgtcttcactgcaggagacatccctccacccacgatggccttcgcggcggccctcggcctgctcacctccttctgtgtgtacacggaacccgggcaccaggagacaggctacgtcttcacccacctcagcctgcagcagtttttggctgccctgcacctgatggccagccccaaggtggacagagacacacttgcccaacatgtcaccctcaattctcgctgggtgctgcggaccaaagctaggctgggcctcttagaccaccaccttcccacctttctggccggcctggcctcctgcgcctgccaccccttcctcacacccctggcacagcaggaggaggtgtgggtgcgtgccaggcaggcggcagtcatgcaagccttggagaagttggccactcgcaagctgacggggccaaagctgatagagctatgtcactgcgtggctgagacacagaagccggagctggccagcctcgtggcccagagcctcccccatcacctctccttccgcaactttctgctgacctatgccgacctggctgccctgaccaacatcctcgggcacagggatgcccccatccacctggattttgagggctgccccttggagccacactgtcctgaagccctggcaggctgcgagcaggtggagaatctcagctttaagagcaggaagtgtggggatgcctttgctgaagccctctccaggagtttgccaacaatggggagcctgaagaagctggggttgtcaggaagtaggatcactgcccgaggcatcagccacctggtgcgggctttgcccctctgtccacagctggaagaggtcagctttcaggacaaccagctcaaggacggggaggtcctgaacatcgtggaaatacttccccacctgccgcagctccggatgcttgacctgagccgcaacagtgtctccgtgtcaactctcctctccttgacaaaggtggcagtcacgtaccctaccattaggaagctgcaggtcagggagacagacctcgtcttccttctctccccacctacagagatgaccacagagctacaaagagacccagacctacaggaaaatgccagccagaggaaagaggctcagaggagaagcctggagctcaggctccagaagtgtcagctcagtgtctatgatgtgaagctgctcctcgcccagctccggatgggtccacagctggatgaagtggacctctcagggaaccagctggaagatgaaggctgtcaactggtggcagaggctgcgccccagctgcacattgccaggaagctggacctcagcgacaatgggctttctgtggctgggatgcaacgtgtgctgagtgcagtgagaacctgccggaccctggcagagctacacatcagtctgctgcacaaaaccgtggtgctcatgtttgccccagaaccagaggagcaggaggggatccagaagaggctgacacattgtggcctgcaagcccagcaccttgagcagctctgcaaagcgctgggaggaagttgccacctcaagtacctcgatttatcaggcaatgctctgggggacgaaggtgtggccctgctggctcagctgctccccgggcttggtgccctgcagctgctgaacctcagtgagaacggtttgtccctggatgctgtgttcagtttgacccagtgcttctctacagtgcggtggcttcagcgcttggacttcagctctgagagccagcacgtcatcctgagcggtgacagcagaggcaggcatctcttggctggcggatctttgccagagtttcaagctggagcccagttcttggggttccgtcagcgccgcatccccaggagcttctgcctcaaggagtgtcagctggagcccccgagcctctcccgcctctgtgagactctggagaagtgcccggggcctctggaagtcgaattgttctgcaaggtcctgagtgaccagagcctggagaccctgctgcatcaccttccccggctcccccaactaagcctgctgcagctgagccagacgggactgtcccaaaggagccccctcctgctggccgacctcttcagcctgtacccacgggttcagaaggtggatctcaggtccctccatcacatgactctgcacttcaggtttagcgaggagcaggaaggcggatgctgtggcaggttcacaggctgtggcctcagccaggagcacatggagccgctgtgttggtcgctgagcaagtgtgaggacctcagccaactggacctctccgccaacctgctgggtgatgacgggctcaggtccctcctggaatgtctccctcaggtgcccatctccggttcgcttgatctgagtcacaacggcatctctcaggaaagtgccctccgcctggtggaaacccttccctcctgcccacgtgtccgggaggcctcggtgaacccgggctccaagcagaccttctggattcacttctcccgaaaggaggaggctaggaagacactaaggctgagtgagtgcagcttcaggccagagcacgtgcccagactggccaccggcctgagccaggccctgcagctgacagagctcacgttgaaccagggctgcctgggcctggagcagctgactatcctcctgggcctgctgaagtggccggcggggctgctgactctcagggtagaggagccgtgggtgggcagagccggagtgctcaccctgctggaagtccgtgcccacgcctcaggcaacgtcactgaaataagcatctctgagacccaggagcagctctgtatgcagctggaatttccccatcaggagaacccagaagccgtggccctcaggttggctcattgtgatctcgggacccaccacagcctccttgtcagggagctaatggagacatgcgccaggctgcggcagctcagcttgtcccaggtgaagctctgcaaggccagctctctgctgctgcaaagcctcctgctgtccctctctgagctgaagaacttccggctgacctccagctgtgtgagctctgatgggctagcccacctgacatttggtctgagccattgtcaccacctggaggagctggacttgtctaacaatcaatttggcaaggaggacaccaaggtgctgatgggagcccttgagggcaaatgctggctgaagaggcttgacctcagccacttgcctctgagcagctccaccctggccgcgctcattcaaggactgagccacatgagcctcctgcagagcctccgtctaagcaggagcggcgttgatgacatcggctgctgccacctctccgaggcgctcagagctgccaccagcttggtggagctgggcttgagccacaaccagatcggagacgccggtgcccagcacttagctgccatcctgccagggctgcctgagctcaggaagatagacctctcagccaatggcatcggcccggcagggggagtgcggttggcggagtccctcaccctttgcgagcacctggaggagctgatgcttgactacaatgctctgggagatctcacagccctggggctggcccgagggttgcctcagcacctgagggtcctgcacctgcggtccagccacctgggcccagagggggcgctgagcctgggccaggcactggatggatgcccatacgtggaagagatcaacttggccgagaacagcctggctggagggatcccacatttctgtcaggggctcccgatgctccggcagatagacctgatgtcatgtgagattgacaaccagactgccaagcccctcgccgccagcttcgtgctctgcccagccctggaagaaatcatgctgtcctggaatctgctcggtgacgaggcagctgctgagctggcccaggtcctgccgcggatgggccgactgaagagagtggacctggagaagaatcggatcacagctcacggagcctggctcctggctgaagggctggctcagggctctggcatccaagtcattcgcctgtggaataaccccatcccccaggacacggcccagcatctgcagagccgggagcccaggctggactttgctttcttcgaccatcagccacaggtcccctgggatgcttgacggcccccgcaagacccttccaatacagccaagtgatgtccgcttccatcccccaggatagagggctcaggaaaagagcctcagctggctgtcccggcacactgttccgggagggagagacgccgttttccaggcacggtcttcagaatggactttatgggcgacaaagagcctaccatggccaacagaccaccctccatcacacatgacatgcatgaccagtcgggaatatgcagcacagtgaggatgtcgtggcgtgatgcaagacacagaaggttgcacgtggcagcgttccatgtgacattgcatgaaacctgcagtgtggcctgtgggttgttggcgtgggtcctagcactacatgtgatgggcagtccatatttgagacgtggcaaatgtccgtgtcatatgccatgtggctggccagatgccctcatgctggtccaagatttaatttattaattttttaaacaaagtatgtatttatagattacctttccagagcagctaaaccagggaatgtcttccaaacaagtgcgatgaggaaagcatacaagcactgatcagcccagtggcctgaggtccagggccctgggccaagccagggatttagccacgaggcttgtggatgactatcctctcgcctcaagcctcagttttcccaatctgggaactggctcacccctcccgtagcttcccaggtcttagagcccaggtccaggtagcgttagcctgaccttggggatcacaggcctgggctgtcctgtgtaagggacaaagccagatctaaggatgcagcgggtggggactgccaagttaggcaaggccgctggacccggccactacctcagtggatctgactgaactcccgggagctcacagtgttcatgttgtttccaagaaggcccaaggattgtgagccaagtttgatcaataaatgtgagtgatcttccggcctctaaaaaaaaaaaaaaaaaa

SEQ ID NO: 7 - protein, 1846 aa, Sus scrofa
MDPISRHLGTKNLWGWLVRLLCKHSEWLSAKVKFFLPNMDLGARNEASDPTQRVVLQLRKLRTQSQITWQAFIHCVCMELDVPLDLEVLLLSTWGHGEGLPSQLEADEEHPPESQPHSGLKRPHQSCGPSPRPKQCRKQQRELAKRYLQLLRTFAQQRYDSRSPGPGQPVACHRTYIPPILQWNRASVPFDTQEGTVAGGPKAEDGTDVSIRDLFSAKANKGPRVTVLLGKAGMGKTTLAHRLCQEWADGQLERFQALFLFEFRQLNLITNFLMLPQLLFDLYLRPEAGPEAVFQYLEENANKILLIFDGLDEVLHPGSSKEAADPEASASALTLFSRLCHGTLLPGCWVMTTSRPGKLPACLPTEVVTVSMWGFDGPRVEEYVSRFFSDQPVQEAALAELRASWHLWSMCVVPALCQVACLCLHHLLPGRSPGQSAALLPTVTQSYVQMVLSLSPQGFLPAESLMGLGEVALWGLETGKVVFTAGDIPPPTMAFAAALGLLTSFCVYTEPGHQETGYVFTHLSLQQFLAALHLMASPKVDRDTLAQHVTLNSRWVLRTKARLGLLDHHLPTFLAGLASCACHPFLTPLAQQEEVWVRARQAAVMQALEKLATRKLTGPKLIELCHCVAETQKPELASLVAQSLPHHLSFRNFLLTYADLAALTNILGHRDAPIHLDFEGCPLEPHCPEALAGCEQVENLSFKSRKCGDAFAEALSRSLPTMGSLKKLGLSGSRITARGISHLVRALPLCPQLEEVSFQDNQLKDGEVLNIVEILPHLPQLRMLDLSRNSVSVSTLLSLTKVAVTYPTIRKLQVRETDLVFLLSPPTEMTTELQRDPDLQENASQRKEAQRRSLELRLQKCQLSVYDVKLLLAQLRMGPQLDEVDLSGNQLEDEGCQLVAEAAPQLHIARKLDLSDNGLSVAGMQRVLSAVRTCRTLAELHISLLHKTVVLMFAPEPEEQEGIQKRLTHCGLQAQHLEQLCKALGGSCHLKYLDLSGNALGDEGVALLAQLLPGLGALQLLNLSENGLSLDAVFSLTQCFSTVRWLQRLDFSSESQHVILSGDSRGRHLLAGGSLPEFQAGAQFLGFRQRRIPRSFCLKECQLEPPSLSRLCETLEKCPGPLEVELFCKVLSDQSLETLLHHLPRLPQLSLLQLSQTGLSQRSPLLLADLFSLYPRVQKVDLRSLHHMTLHFRFSEEQEGGCCGRFTGCGLSQEHMEPLCWSLSKCEDLSQLDLSANLLGDDGLRSLLECLPQVPISGSLDLSHNGISQESALRLVETLPSCPRVREASVNPGSKQTFWIHFSRKEEARKTLRLSECSFRPEHVPRLATGLSQALQLTELTLNQGCLGLEQLTILLGLLKWPAGLLTLRVEEPWVGRAGVLTLLEVRAHASGNVTEISISETQEQLCMQLEFPHQENPEAVALRLAHCDLGTHHSLLVRELMETCARLRQLSLSQVKLCKASSLLLQSLLLSLSELKNFRLTSSCVSSDGLAHLTFGLSHCHHLEELDLSNNQFGKEDTKVLMGALEGKCWLKRLDLSHLPLSSSTLAALIQGLSHMSLLQSLRLSRSGVDDIGCCHLSEALRAATSLVELGLSHNQIGDAGAQHLAAILPGLPELRKIDLSANGIGPAGGVRLAESLTLCEHLEELMLDYNALGDLTALGLARGLPQHLRVLHLRSSHLGPEGALSLGQALDGCPYVEEINLAENSLAGGIPHFCQGLPMLRQIDLMSCEIDNQTAKPLAASFVLCPALEEIMLSWNLLGDEAAAELAQVLPRMGRLKRVDLEKNRITAHGAWLLAEGLAQGSGIQVIRLWNNPIPQDTAQHLQSREPRLDFAFFDHQPQVPWDA

SEQ ID NO: 8 - DNA, 8621 bp, Sus scrofa
gtctgagaagagcttcactcaggagcatctgacccaccaggagcctgcaacatggtccaatagcgccccttattagccatgagctgctggtgggttccctcctcaacaatggtgcctccttccagaaagaggatgtgattggcctgctccacggaactaagacgctgggtgatgagaagcacagaccgggagtaccgctcagggctttcatacaggagcgactccacctgagaaaaaaacacagactctgtcagagctgggggccactcccggaagagctgggacagacctcgccaggatcactgccacttctgccaggaaccccaaaatcaaagcttctcattctgagtgcttctctgtcaaacttttgatctgttaaggacggtttacatgagggggcaagagcgtgtcctatggtgaaactcataagtatgaagggtattgagtagcctctcctctctaatttttatattctctttcaaggagacataagtgagtagtaaagagaatgaatattcgagtcaggcagactcgaatttgggtccaggctctgctattcaacattgagctgaatgctatcgagtgcgttgttcagcctctcttagcctgcattttagcatctgttcgatgaagataacaacagccagctcacaagcattcacgatgaataattaaatgagagagtacatggaaagggcctgttaacatttctggcacatggtaagatttcaactaatattggtatgatgggatcttttcttttgtttggcttcacagattcagagtctgaggatcgtctcttttaactgactctaggcatgttggggagaagcgaaggggaactgagaattgcaaagactggtttggatgattatgatgttagtacaataacaaaggatgagtgaaggaaggaggactgggtgggttacaggcattaagaagatgactctctcacccgtgcttgactgtttgcatccagggcactggtagcatcatccaggatgagtacccgtggtttccggatcaaggctcgagccaaggccactgcctgccgctgaccccctgatagctggctcccagcctcacctacctctgcagagacaagtgcccaggtaagagctggataaacacatgtgcatccatgtgcttgcatgcacgcgcgagcgtgtgtgcacatgtgcacgcacgcacgcgcgtgcacacacacacacacacacacacacacacactcggactaacagatacagctggatagggaaggttctgggaaggtgaaggagttctgaggatatgaggatgaaagagccatagaaacaagctcttacaacttcatactgatgaataaaggcaagactattggatttcaacaaaggtaaagatgtctgagccataaaataaaatttaaaaaaaaaaagagttcctgctgtggcacagtgggttaaggatgcaactgcaggagttcctgacatgactcagtggtttatgaacccaactagtatccacgtggactcgggttagatccctggccttgctcagtgggttaaggatccagcattgccatgagctgtggtgtaggtcagcagctgtagctccgattcgacccctagcctgggaatgtccatatgctgtggtgcagctccaaaaaaaagcaaaaaaaaacaaaacaaaacaaaacccgaatgctgtggctcaggtcgccttggaggtgcagttcaatccctggcctggtgcagtgggttaaaggatctggcgttgctgcagctgctgcataggttgcatccgaggcttggattcagactatgggtgtggccataaaaaactagcccccccaaaaaagatgcctgggtggtgatatgagaggagagagcacctgtgtcgtagccttgcgggagcttggagatgaagctatgggctccggactccacggcggcagctatgacttcctccattgctggcttctggctcaggccataggcaatgttttcttgaaaacttcttccaaagagctgtggctcttgccccaccgcagccacctgggacaaagcatgatgagagaacgaggaacacaggagtatgatgatctggagactgaagactgaaaatctttattgtgaacaaatcatgaaatcacacagcctctctcctgaacacaccccccgcccccccaggatctcctgtcattcccagcactcctttcagagtgcccagtgagcatggtcttcttactcgcagctccctgccctcccctgtgccaccttcttgctcacctgtctgtgcaggtagcggtgctcatattcaggaaggggcttctcacccagcagcacctgcccctccgtgggctggtacaggttctgcagcagggcagccacggtgctcttcccagacccattgggccccacgagggcggtcacctcaccaggacgtagagtgaacgtgaggccctggaggccagagaatcacacactaagaggcagatcaaggcccctaaccttaagagcgtcatggacttggcccattgttttgtcagtgtctcaccccagagaagaaaagaggaaagtggagaaacacagcaactcctaccctcccacatgcacagacttctgctcctcagcgatgccacctccccgtggactagagatggaagaagagacaaagaccagggcaaagaccatgccgcacactcaatctcagagaccaggagaaaaaaagaaaaaaaaaatcacatttgaaatcacaaatggaaagaaaaaggaggagttcctgttgtggctcaggaggttaagaccctgacatagtgtccgtgaggatacaggttcaatccttggcttcgcccagtgggttaaggatctggtgtggctgcagctgccccgttcagtcacagaagtggctcagagccggtgttgctgtggctgtgatgcaggcgttcagctcctggcccagtgtgaccattaaaaaaaggaagaaaaaaggcaagaaaaaggaaagatggaagaccagatggatacacagattttgcagcagttccttaggatatgacagccttctccctgaaagcctcctttcctgtcctccctggaaatccaaactaggtcttgagtttggggcaattttatggaacagatgatgctcatctttgcctctgaagggtaaagaaggatctagctacacctgatgttaagcagactgaaggcaggaagacgattcagatcgagctgagaggaagattggtggagtgcaggggttggtgggttgtacctgcagcactgggacctctggtcggttcgggtaggcaaaggagacattctggaacttgacaagcccctctgactttaaggaagtcaacgatccactggccgggcagcgagggattcggtccagatactcaaatatttcctttgaggagcccacagccttctgtaccctggggtaggtggacagcagtacctggaggggaggtatgaatagtgagatgggaggaggtagtgggggagggacctaatctgcctgccaggattatgtgatgtgagaagggcaaagcatggaaggaaggtgactcagatggtgatgggacaggggagggaaaagccctgggatgtgagaatggaaggacctcacctgaacagcttcggtgaactggatctggtagagaacaaatgtgacgaggtttccgctgcttatagccccacctgccaccagcttcccgccaacatacaggattcccaccttcagcaacatccctgagatctgtggagagaccacacagaaaagggacttttgtagaaaaatctagaggggctgcagagaagcagaatcattagcattaaggagataagaagttcttggagttcccgtcgtggctcagtggttaacgaatccaactaggaaccaggaggttgcgggttcgatctctggcctcgctcagtgggttaaggatcgggtgttgccatgagctgtggtgtaggtcaaagatgtggctcggatctagtgttgctgtggctgtagctctagggtaggctggcagccgtagctccgactggaccccttgccagggaaactccaaatgcctcaggtacagccctaaaaagcaaaaacaaacaaataaacaaaaaaaaggaatgaaccatagcaatgccacggagtctcactcagttatacagaaaagaagccaatcgttattaccatcaccattatcaccttgtctgggaagcatttactctgcacaaaaggctttcatgaatgtaatgtcatctaatagtcgcatcaaaagccccataaacaaggttaggtcactgccatttttaaaactgagaaaacagtctcagagaagtgaagtcaccagcccctggtcacagagccggaaaatggcagcatcgtgataggaacttgatggctggtcgtgttcgctttcggttacatcacaggtgcccctcatccttgcttctgctactcccaggactctcactagcatccatgtagtgtcagcatgaaacgggacagggtgccagaatttatagtcctctgagcacccccttgaggcaaaagaaggccttggaaaacacttccctaaagagagggttgggtggatttttgtgtaccgtagtgaaaggaagccatctagcacgcctaaaaaggggggagggggttaggaacagtgagtagggtgactgagcctccggttgttagaatatggccactgaaccaaccactgggcagtggaggaagagtgtggagcagggtcatgggaaagggaatggcattgaggcatcttggggacaagggactaggcagtcatctgcaggtgctcacactggtggtccagaggtcgaccgcataggccagggcctccttctggttgagtgtcttcatgtcctgcagcttttgcttgaacttctgggcctcaccctcttcattggcaaagctccggacagtaggcatagctgacagaacctcaatggccacctggcttgactttgccagagattcctgcacctgtgctgccagcacctgtggagacgtggaccagagatgccacacatgattgttgacaaaccataggggacactagtacctgagttatccgattagagtttaaaggtgagacgtggcagagggaaggcaaggggacaaagggacacagccaggcccccagatactaaaggatacagagaagaggaaaatgacttagaagcgtcgtaggggagcatattcttgagatgggtgatcatgttcttaaagacagattgtgggcaggcattagaagagaagacacaagggatgtgaagatcaacactgagcaatctgggaacatggacgacagggacaaggagtcccacaaagaggagaaccagtgaaggtgccaggaaagggatctgagcccaccaagtctgggatgagggtcagtgtaggttgaggcaactccctagacatacctggtgccatttccccagcttctcaggcagaaggaaaagcagtggcaaggcggccagggtgaccatggtgaggggaggtgacccccagagcatgagccctaagagacacagtccccgtgcgaggtaccacagcaagaggctcagctccgaactcagagacacactcacagtggatgtgtcctctgttacccgagatgtgatggcacctgccaagggttcaagagaagagagtggagtgaacaggaggctcagagtgatgggagcgacgagcaatgagccaggtgccacagcgaagggcatcaacacagtgttctaagaaggtcaggaaaaggagttcccgtcgcggcgcagtggttaacgaatccgactaggaaccatgaggttgcgggttcgatccctgcccttgctcagtgggttaacgatccggcgttgctgtgagctgtgatgtaggttgcagacttggctcggatccgcgttgctgtggctctggcgtaggccggtggctacagctccaattcgacccctagcctgggaacctccatatgccgcgggagcggcccaagaaatagcggggaaaaaaaaaaaaaaaaagacaaagaaggtcaggaaaacaaggtctgtggttgggggaggactgaaacataatgcaagaaaaatgtgttagagtggaaaagcctggccaaagaccttcgttttaactataaagaaattgatgcccagagttcccactgtggctcagcggttaaggacctgacgccgtctctgtgaggttgcaggctggaaccctggcttcgctcagtgggttaaggaccagctgttgccacaagctgtggcgtaggtcacagatgctggatcaggtgttgccatgactggcacaggcctcacctgtagctctgattcaacccctggcccaggaacttccatatgccacaggtgcagtcataaaagaaaaaaaaatttttaaagaaatggatgcccatgtgaacttctgtttctctgacaggtgtctgttccttaaagaacttgtatataccatgctcataggtaggaagaacttaagctggtcatacaagagctggagaaaaatggagagactactagagagcagtccaggaaaccacagcaagcactggattgggaatcaagacatgggttctgctctcaagtttgtcttcatccatgtgcatccatgcaaatgttggcatttaggtctagacctcatttcacttctctgtaaaatgagtcagctagactctctaatctcaaaatttccaggtttgaaattctacctaaatacacttatagggatagtttatggaaaaatcttgggtggaaacagtaggttaatcatttttttttttgttttattgtgtttttggttttgtcttttttttttttttttttttttttttttttgcccttcccacagcatgcagaatttccctggccagatggaacctcgccatagaagcaaactgagtcacagcagcgatctgagccacagcagccacagaactacagcagtggcaacaccagatccttaacccgctgagccaccggcgaactccaacagtaggcttttctaaaggtaaagagcatatcttgctcttgaagtacatcaagaataaaaagggacaccatttgtgtgtgtgtgagagaaagatcaagattataagtaaaagatgaagtgtggggatacaaatagaaaacagacggataatgaaagaggttcataagacacctgtttgattcttctgaaaaaactctgtttcttggcgcaggacagaccgaaacacctctccctgcaggtggctgtgcacgcggcccatggtgctgttatagatcccgtcgcacacgaactccagcaccgagctagagggagacaaagaaggagggccggtcggtcagggaccccgtagaagtgcactttggagggcggccccaacttccaactgcgcccttttcagggtcccccgtccccagccttccaagctcagcagtcagacctggctatgatgaggatggacatgagagttaggttctgcgtgaaggcagcacctgccccatctcgtagaatccagtcagtgagccggcctgtgaagaacggaatggccatctcccctggggagggagaggagagatgggcgggtcagaaagagcaagtctaagcagcctaagcagctcagctctaaccaggctgcacctcccgcccatcctcccttcacccttgcccattatcctgcagaaacagcgcacactctcggcactggaatgggcccccggggaactcgtaatcctgtggcctcaccagacctttagagggttaattaagaagcctaggatggtaggaggaaagagctcgcccaaggtggccagtgaagcaacacctgagcagcactggagtccaggactcctgactcccacccagtccagggctctttcctctccaccaagtggacctgagcggggtgggcttgctcttatccacatttccgagaactcacacctgtctatctcactgaccgttaggcttgattcctacccagccctctagcctccctctccctccccccgcatcccccttaccaaggctggagaggaccaccagggtcagaaggagccagaggtggcggatctctgagcccaggcagccgagaagccggctcactgtcactccagagcctctgtgacttccttgcacccaaaggctgctaagcttatgccacagggcggccgcgggcaatgccgccgcatagctgagggcgaaggcatcgaggcgactcccccagtgcagtagccgcgtgctgtcagccgctcccgagcccaactctcggaacaaggcaagtcccggcagagccaagcccagagccgccgccagcggctccaaagctgccagccatccccgaagtcctgtgcttttctcccggaagccaaccgtcgccctgaggacgctgcgggcccccaaccacagcacagcccaacggctcaggcccaccacccagacccggagcagcggcagcgctgggggcagcagcagggaggatatccggggcagcgccggccggagcagcacccagtcggcgagaagcagcagcgctgcccccagccaagggagggaagctcgggagacgcagagacacccgcagggagcggaggaccccgagctggccattggccgtacgaggtcgaccc

SEQ ID NO: 9 - DNA, 2280 bp, Sus scrofa
gcccttgggtcgacctcgtacgccaatggccagctcggggtcctccgctccctgcgggtgtctctgcgtctcccgagcttccctcccttggctgggggcagcgctgctgcttctcgccgactgggtgctgctccggccggcgctgccccggatatcctccctgctgctgcccccagcgctgccgctgctccgggtctgggtggtgggcctgagccgttgggctgtgctgtggttgggggcccgcagcgtcctcagggcgacggttggcttccgggagaaaagcacaggacttcggggatggctggcagctttggagccgctggcggcggctctgggcttggctctgccgggacttgccttgttccgagagttgggctcgggagcggctgacagcacgcggctactgcactgggggagtcgcctcgatgccttcgccctcagctatgcagcggcattgcccgcggccgccctgtggcataagcttagcagcctttgggtgcaaggaagtcacagaggctctggagtgacagtgagccggcttctcggctgcctgggctcagagatccgccacctctggctccttctgaccctggtggtcctctccagccttggggagatggccattccgttcttcacaggccggctcactgactggattctacgagatggggcaggtgctgccttcacgcagaacctaactctcatgtccatcctcatcatagccagctcggtgctggagttcgtgtgcgacggaatctataacagcaccatgggccgcgtgcacagccacctgcagggagaggtgtttcggtctgtcctgcgccaagaaacagagttttttcagaagaatcaaacaggtaccatcacatctcgggtaacagaggacacatccactgtgagtgtgtctctgagttcggagctgagcctcttgctgtggtacctcgcacggggactgtgtctcttagggctcatgctctgggggtcacctcccctcaccatggtcaccctggccgccttgccactgcttttccttctgcctgagaagctggggaaatggcaccaggtgctggcagcacaggtgcaggaatctctggcaaagtcaagccaggtggccattgaggttctgtcagctatgcctactgtccggagctttgccaatgaagagggtgaggcccagaaattcaagcaaaagctgcaggacatgaagacactcaaccagaaggaggccctggcctatgcggtcgacctctggaccaccagtatctcagggatgttgctgaaggtgggaatcctgtatgttggcgggaagctggtggcaggtggggctataagcagcggaaacctcgtcacatttgttctctaccagatccagttcaccgaagctgttcaggtactgctgtccacctaccccagggtacagaaggctgtgggctcctcaaaggaaatatttgagtatctggaccgaatccctcgctgcccggccagtggatcgttgacttccttaaagtcagaggggcttgtcaagttccagaatgtctcctttgcctacccgaaccgaccagaggtcccagtgctgcagggcctcacgttcactctacgtcctggtgaggtgaccgccctcgtggggcccaatgggtctgggaagagcaccgtggctgccctgctgcagaacctgtaccagcccacggaggggcaggtgctgctgggtgagaagccccttcctgaatatgagcaccgctacctgcacagacaggtggctgcggtggggcaagagccacagctctttggaagaagttttcaagaaaacattgcctatggcctgagccagaagccagcaatggaggaagtcatagctgccgccatggagtccggagcccatagcttcatctccaagctcccgcaaggctacgacacagaggtaggtgaggctgggagccagctatcagggggtcagcgacaggcagtggccttggctcgagccttgatccggaaaccacgggtactcatcctggatgatgctaccagtgccctggatgcaaacagtcaagcacgggtggagtcgctcctgtatgaaagccctgagcggtactcccggtctgtgcttctcatcacccagcgtcttagttccgtggagcaggccaatcacatcctctttctggaaggaggcaccattgttgaggagggaacccaccagcagctcatggctaataaggggcgctattggaccatgttgcaggctcctggtgggtcagatgctcctgagtgaagctcttctcagac

SEQ ID NO: 10 - protein, 746 aa, Sus scrofa
MASSGSSAPCGCLCVSRASLPWLGAALLLLADWVLLRPALPRISSLLLPPALPLLRVWVVGLSRWAVLWLGARSVLRATVGFREKSTGLRGWLAALEPLAAALGLALPGLALFRELGSGAADSTRLLHWGSRLDAFALSYAAALPAAALWHKLSSLWVQGSHRGSGVTVSRLLGCLGSEIRHLWLLLTLVVLSSLGEMAIPFFTGRLTDWILRDGAGAAFTQNLTLMSILIIASSVLEFVCDGIYNSTMGRVHSHLQGEVFRSVLRQETEFFQKNQTGTITSRVTEDTSTVSVSLSSELSLLLWYLARGLCLLGLMLWGSPPLTMVTLAALPLLFLLPEKLGKWHQVLAAQVQESLAKSSQVAIEVLSAMPTVRSFANEEGEAQKFKQKLQDMKTLNQKEALAYAVDLWTTSISGMLLKVGILYVGGKLVAGGAISSGNLVTFVLYQIQFTEAVQVLLSTYPRVQKAVGSSKEIFEYLDRIPRCPASGSLTSLKSEGLVKFQNVSFAYPNRPEVPVLQGLTFTLRPGEVTALVGPNGSGKSTVAALLQNLYQPTEGQVLLGEKPLPEYEHRYLHRQVAAVGQEPQLFGRSFQENIAYGLSQKPAMEEVIAAAMESGAHSFISKLPQGYDTEVGEAGSQLSGGQRQAVALARALIRKPRVLILDDATSALDANSQARVESLLYESPERYSRSVLLITQRLSSVEQANHILFLEGGTIVEEGTHQQLMANKGRYWTMLQAPGGSDAPE

SEQ ID NO: 11 - DNA, 75569 bp, Sus scrofa
  modified_base (6835)..(6934): a, c, t, g, unknown or other
  modified_base (57902)..(58001): a, c, t, g, unknown or other
actgagaaaataatttatttaattttaaatcaggaatttttattttttaatattgaactattaataagatcttgaatttgtccatttgaaatttaaatttaaatgatttttttttaaaaaatcaagattccttcaaaaggaaatatcagtccttttctttaatctttgagaacgaatcatttctgtagtttggaacttgcaccatgaagtctctgcactccagaatggattccataaacttgcgttatagagaaacaagagtcctaattgacttgtgatttcctttttcttttacaagactacttctccaggatttttgttgagttattttgttgggttattttgttgagttattttgctgggttgcaaaaatttttagcaagaattgaagagtaggaggcccagggaaacagtagagaaaatgtaggtttcattttatcaaagaagcccatcgtgctgaacatcaagtcagtgcaatggctcttcaagtaaatcatttgaaaatggacacaaatgacctaaactggaacacaagcaaaagtatatcacatacctgcagatgtaaatattgcctcctaacttcctttacaccaaactgcttaactttaaattacatgtaagatctcatagcttttcttagagaaagggattgaaaagctgtttagtcatgaggactgggtctcccattgccatcctctctactttgatataaaatcaattaaccactttattaaacatgtccggcagttacacttcagtagtgcagctggggcaggggaaatgagaggttccctgataagcaggcttttcctctagtccactccttgacggtggctctcaagttgcccatgatgggctgagggactctgagagttagagcaggtggcagcaggacttgctgatgcctgattgtcatgaagccaagatctaggaagtcacttcaacccactgtaggcctctgtccactctgacatcatccacttcctctgagcaaggatttgtagacacaaattccagagtctggcagactgaatatgacttggccaaagcaagaagcatcttctaagacagtgctgctctagttgtcatatggttgaggaggctggagccactctcattgcctcccattcagtgcctggatccaagctgtatgtacatgccaactccatgccctgtgtctcttagaaatggcattgccccacagtgatcagccccctctctttccaatctgtcttcgctatttcatggcaaacttacttagaagctgtgcttttatttcgtgctgagctcccattggttcattcggattccctgtaactcccaacattcaccattgggaatcttgatcagtatctgcgcagaagccaaacaaaaccctgatgcgaaaaggacatggacttcaaataacctgaagtcctctgctgttgaaatcatctgaggattgctaaggtagactctgatctcctgctgcaaagcaactctgttgctttagacttagcagagacaggaagacgctaaaatcaagaggacgacccctcccaatcttattttgttgccaaacacttccctttgcatacttttctccagtatgacatgtagagtgtctctgactttttctttgcctatgacaatttttttttttggttcagttaatagtatataccccctcaacccagaacagataagaaatcattgggaatttacatctgattactacagagtcattctcccatttgacaaggctcaaagttgcaaggaagaataatatgtacttactgtgttggtattttgttagtatttttttaaaagttaaaattaagtgctacttctctgaggaagtagccagagtaatactctttcaaattcagaaaactgctggcacaatttaaagtcagatgttatttctaaccaaattatactcttttttctgccaagctatcttgacaatcctaatatccacagacatgcctatatgataatcccagcagtattctggggataagattttagtgggtttgttgagaaggaaatacttgtttagatggctttcatcatgccactcggcttctatgtcattttccttgtcctggaggattcccttgaagcactcctgagtgatgtttagaacctgagtgggtgttcccccaaaaatggctgcgtggtaataaaaatccccctggccaaacggaatgtaggctgcggactccttccgcctctcgtaggtgaactcgtcaggatgtgccttgtaccaccaggcctgtagctgagccaccgactggcccagggtctccaccccaaagttgttttggaagacctgatccacgtccatgcagaagaggaagtccacctcgtgctggatgtgggccaggatgtgctccccgatggtcttcatgcgcatcatgctgatgtcttgccacctcttctcggacttgatctcaaacactttaaaggaacgcagaggacccagctctatcaaaggcatcctggagatatcatccaccatgatgtaaaagatgactttgtggccaaccatgaagtatgtatttgcagatattaagaactcctccaagtaatgctcaatgtatctgaaataaagaagaatggggtaaatgtaacctctgggatttctagaggagacaatatgctattatcatctagtctgtattttgcagtttaggaaaggaatgatttttccccatcctggatgagagacgtctgttgctgtaacattcccagctactctccaccattcagtcattcagctttggggaggtggagtggcttacctgactggtgattctggcagggtggctgggcatgctcagccctgctccttcctctctcactcttggaagccaaccaggcagagagaacatgtgttttcagctgctctgggccttgcagtggtaccttagtggcacaggccctgctcccacatccagaggcctgcagttacttgtgctgtatgtgcctggatgcctaagtctttctaattctgtggttcaagatttggaagcccagggcctgcagttataagccacatactccaacaccagctttaactgtaatgaaggtgataactcattaccatctgccttaattagtctttatccccttgtccttatcaatcagttcagatgctagttcttccttttttcctgcattattcagatataactgacatatatcattgtgtaagtttaaggtgtgcaaagtgttgatgtgatgcacttatttttaatttttattttttgtctttttagggccacatccgcagcatatggaggttcccagactaggggtctaattgcagttgcagctgctggcccatgccacagccacagcaacaccagatctgagctttgtctatgacctacaccgcagctggtggcaatgcttgatcctttaacccactgagcaaggccagggatcgaacccaaatcctcatggttactagtcagattcttaacccactgagtgacaacggaaactccctggtacactcatatattagaaatgattaccactgtggcattacttgacaccttcatcatatcacataattaccatttttttgtggcaagaagacttaggacttattctctgaccaaccttaaagtatatattacagtatgattaaaaacaatcaccatgctgtacattagatcccagagcttattcatcttataactgcaagtttgtaccctttgattaccatcagggggcactagttcttagctcttcctcaaaaaccccagcctatattccaatacttttactgacctaccagatgcaagcgtgatgtgcaagggtcattaagcctaaccatcgccactctcttatccttctctgggacccaaacaatggattatggaatatggatattcttccatcttactgatttaccctgtgagtttcccgctggtcaccccaaacaccagcccattatccagacaccatcattataaaacccatccaaatatgagagcaaacgacctctgattcaaccttactttaactatctcgtttcatttaaaaaaatagattttagtttttagaacatgtttaggctcacagcaaaattgagctgaaagtgcagaattccccccgctccccccactcccactcccagcttctcccaccatcaacatccagcaccagggtagcacgtgttgcaactgatgaaactacactgacacatcattatcacaccaagcccgtagtttacactaaggttcactcttggtggcagactttctatgaatctgaacaaatgtaaaatgacatttatctatcactatgtatggtaccatacagagtattttcactgccctaaaaaatcctgtgttctgtctattcatccattctcccacaccatcgcctggcatctactgatatttttactgtctccatggatcagtacctttgaccttttccagaatgtcatatagttggaaccatatagtaggtagtctttgcagatggtttcttggtaacgaacatttgaggttcctccatgtcttttcatggattgatttttttttttaaagcactgctaatactccactgtctgaatgtgctacaatttatcaattaatttgcctactaaaggacctgttacttccaagttttgggcaattatgaataaaagtgctataaacggagttcctttcgtggctcagtggtcaacaaacccacctagttgcaggttcaatccctggcctcgctcagggggttaaggatccagtgtggccatgagctgtggtgtaggtcgcagatgtggctcagatctcgggttactgtggctgtggcataggccggcagctgtagctctgattcaacccttagcctgggaacctccatatgccgcaggtgtggcccaaaaaaaacaaaaaaagaaaaaaccaaaacccaccccccccaaaaaaaaatacctgctataaacatctgtatgcaagtttttgtgtagacataaagtttcagcttttgagggtaaatactaaggtgtgccatcgctggattgtatggtaagagtatgtttagttttgtaagaatctgccaaactgtcttacaaattggttgtatcatttcgcattgccagcagcagtgaataagctttcctatcgctctacattttcatcagcagctggtattgtcagtgtttgggatttgggtcattctaatagatgtgtagtggtattttagctatttacctattcattcaaaaaccatcatgttcaggaagaaaaggaaaggggggagttcccattgtggcagtggcacagtgggttaaagatccagtgttgctgcagctatggagaaggtcacagctgtggctcagaacttccatacgccacaggtgcagctgaaaaagaaaaagagaaaaaaaaaaacccatcacattcctgtcttctgtaagccaagatacaggctattctgtgaagccatggggatgatagagaagggaagaagtagttggctggcttaacacaacccacgtcaccacccagactcatgcccagtgactgtgcactgaatttaatttgttgatcacattatcagccaatgatgacattttgtaataatgactggcacttccttttgttttttggttgctgcttggattccctttgattactacaaacataaactgtgctttcaatgctggtctctggaaaccccaggtttatagtattgattctttaaacggagagaatatctcagcaatacaaggagggacttcaacatggctctggggctaatggccaggaaattcttctgcactctggaactttaagaaaaaatctattgtgccctgaagcttgggaggtgatcctaggggcgagggaggaaacctttgtgaggtttaacattgtttagagattaaagcgctgcagttggtgctgtgcactgtcatttgaaaataaaccaaacatcacacctcctaaaagtccaaatccactcttgggaggatttattgctgctgagtacaaacagtcctcactcgcctcagagcagagtgcgcgggtttcaccaggacatgccaagtacagtttagttctctaaagctgcaacaagatggctagagccaatgtggagccgttctttttggaaacaccaaggttaaatcaatctgcagtatggctggctggtctcctcttataccaaaggattaggtgagctgggaatctttcccaactcctaacagaacatattcttctagtcgaaaggtcaaaactccagagtcacccttctctattagagatgccacccaggcccctgggatcagtacattcagggacattaggacttgattagtacagtgacagtgataccttctgggctctaggttggagaaggtctcaggaggacgcttaaatcttcactcagatcaaccttgaccttcacttctctttgtacaggcaacaggtcaactaacttcttttcttttcttttcttttctttctttctttctttctttctttctttctttctttctttctttctttctttctttctttctttctttctttctttccttccttccttccttccttccttccttccttccttccttccttccttctttctttctttcttcctttctttctttctttcttcctttctttcttcctttcttcctttctccctttctctctttctctctttctctttctctttcccttccttccttttctttcttccttccttccttcctttcctgcttttttagggctgcaccctcccaggctaggggtccaatcgaagctgtgatgatggcctgcgtcagagccacagcaatgcgggattcgaaatgcatctgtgaccacaccannnnnnnnnnnnnnnnnnnnnnnnnnnnnnnnnnnnnnnnnnnnnnnnnnnnnnnnnnnnnnnnnnnnnnnnnnnnnnnnnnnnnnnnnnnnnnnnnnnntttcctttcttctctttcggatttttttttaagtttggtgaaagtatagtgtcttacaatgttgtgataatttttctgtatacaaagtgatttcagtttctttgtggcttcagaaaaggtacagatggaaaggcccatggatgtgggggagggaaggggcacggaggtgaacaggaaaattgaacttttgcttttgttttggaaaaaaagggggggggattctctaaaaaagaaaactgggttatattttaaacgaacattacagctactacttttaagtaagaatgtttacagtttggggagaaaagttccaaacaaggaaacgggggctgaaacaggaacctatccaacctctggaagaggaagttctgagcagcctaatctccccgggccaaaccctccaggaggaataggcagaaggcacagaggagtggtcagccatgcggacgtggaaaaccactccacttaggacacttctgtctttggtccttggtctggggtctcgagagcataggagaaacgacgcacacacaggccatctaacaattgccatttttggaatttccacagagggccgtggaggtcagggcggaggtggctgtgggtgtactgtcgactctgggtgcagtgggtatagcagatcttcttccctgcaacccaagcccctcaccctgaggtgggaaagagttgaccctctgactagttttattcttagcctttggggacctcagcagaagggagtctaaaatggccctgtgacaccattctcctctccactaattcagacatgacatgaacagcctctgtaaacccaggggcccctcacccatcctctgatagtggaaggggaaaaactcaaggccagttttattagcaacacctaccttccgacagcaaaaaccgtcaagcccacggtaattttctgtttggcataataattatctaagacggctctgttgtaagtgccttcccataccactggagccttccatctggttatggtcacgacctctgggcgtttcctggtgacaaaacatagagtcaggatggctttgctaaggtacgacagtctgggggaacatgggtcagtcatggcttgtggtgactggccttgaatcctgactgtattttagccccagtcagctggtggtgtgacattgcagcatcttctgggggagggacaggaggctctggcccaggtgcctctgcgggctgccctggtggcccctttggggatcgtacctgtacaacgtgtatgtaccttccgtccccctgttctgctgtcctcgtcctcaatcttccttccaaaccccttcgcctatctccccaggcccttcctaagctgccagcgacatctttgggtgttgcttatcccagtgggtgccacctgaccctgagaaagccctatggcttgactagcgggatgagagagtgacatttgagctgaaagaggaagaagctgtctcagtttgccttctgccagaaagcaatttctgggtaggaacctggttatcggacaaaaagggccccagactaaggggacctggtgttgtggttcattttacgaagaaggagacagtcacccagaaaagaagggacccggcgggctaactgtggccatgggtgacacacagggctcgggctcagacctctctcagatcatgtcacctcttgactagaagcacaaaagcgggaggggagggggcatgttctctgcacccagaacacttgaaagggacttagcaaagccaacacaaacacaggaagccacggaagagcaacggacaaattgtaaagagtaaatgcgggaagtctgggtagcagctggggccccccagaggcaggagggagctgagaagacttggctcaaaccccatttgctctggaagtggctgcacttccccgtcggaaacagactgaaacgtggtcatttagattcaacccccaacacaacatgagagggcctggcccctgctagctgtgtgcttgtatttcagccactgcagggagaaggccagtggttggggcaacgtcttgggggtcccatcgggcccctgctggctgcctgggtatggccctggtgaggctgtctaggagatgttagcccagcgagaacatacccccaccctcatacgcgggtggaggaagggttttcacaaacctgcccctcccccatgggagaaaccatgtttccctgcgagattgggcaaggctgggtcacccccacttcttgctcatgccttctgtccctcgtcaccaagctctgcacccgtattctggagctgcctctgccctcccacccccaccccatgccctgcttcaagcctgcttccttcctcccctaagagtaattctgcagagatggaggggacatggctaggctgctcaaaccccacacccccagctctgccttcacaccccaggtatgaccgccccttggggacacctgctcttggtttccaacaatcatgaaagaagctgttttggactctgtaccaacttgtgccaggtactttcacatacactttctctcatttagtccttgcaaaagcttggccatgtagtatgctcaatgtacagatatgaaaatcaaggctcaggaaggcttgttaacttgaccaaggccaaacagcagatgatggtaactaacacacactggctccttcctatgggaccaggcacagtgccaagagcttcacccttttgtgggggtggggttgctatattttgattcccattttatctgtgaggaaactgtagcacagagtggtgaaataacttgtctgaggtcacacagctagtaaggagccaagctgggatttgaacccagatagtctgactgtggtctgtgctctgaaccactaccctctatggcttcttggctatttacttgctgtaccaatgaactggagttaaaacccaggtatgtcatcatttccactcatttgagctacttcagcatttttatcagggcagaataaaaaaaaatgatgagctttttttttgtttgttttgttttgtttttagaaacttatgtgatgcttttctcacataaaagccccagctttgttgaatgactggatttcaaaccaaaaaaaccacacacacacacacacacacacacacacacacacacacacacacacagcttaggcttatcattctataaccgtttcccatgcactgtcacttcattcattcctgtccttagtgtagcctgtcaaggatctcttagcagttcagaccccagcctatcagttaagccatgcagctgtgtgtgagctgaacatctggcaagcaggcaatattatctttaagcaaagaaaaggaagagaaagagaaggaggaagaggaggaaaggaaggtattcttatttactagtcgcaagcactggggttaagtaccggacttttattctctcattgaatccttacaaccacgttcaagagtgggtgctatcatcacctccatttcacaaataaagaaagtcgggggtgagagagaaggaaactatgtttttagccattcaaccaataggaggggccacaccagggcatcacctcctcgatgcacatctgccaagtccctgctccatctgccggggcccagggctaaagacggagatcagacccatcctaccccttgagaacttcccatccctgacaggtggtcagcctgccgcacactcctcagccgcacaacccctcagactacaccttctagaaagaccgattcagaacaccagtgtccagtttggttacttggctgggaagattccttttaagcaggggggagaaaaagtagcaatattaaaaattaacgtcgaattaaaaattaaaatgctctatttcccagctgttaattattaaattccactggcaattccaacatgtcagcaaccctgactaggaagccatatgacaggctgaaaacactggccgtgggcaggaggaggaggtgggaggatgattgagatcagcttcctggatgaacctctgctcaaaccccacccccaccccggcccacagaaaaagaagaagtaacagcaggcaggccaagtatgtgtaagagcaagagctgcccaacgtcatcaagagagggctcgaaaaggagggaaaagtccaggaaacactggaaactgctcagttttttaagccgggcacccactgcgttacttcggcatgtggggttccaccagtgcaaaccaaagacttccacaaaataaaagggtctccaaaatccaaacgcaccacctacctaggtagttggtagcttttcaattttatgtacttatttatgggtacactgtggtcctgaagggctgggcagaggaagtgttaaaattctatgaatcatacagcaggtggaaaaaaatgaggaatgcaacaatgtgttacttactggattccttccaggcagcaggacgtacacagtgatccagcaaagagctaatgatgccatggacaagggtgatggagagagggagatgacgtgggaagaatgaacagaacatgtagatgaattagactgtgggctggatgaaggaaggatgaacagtgaatcatggaggtctcctgactcttgcttgagatgggaaatgagaagaatgagggtggggtggaatcaaaaactccctctgggagttcccgtcatggctcagtgggaacaaatctgactagcatccatgaggatgcaggttcgacccctggccttgctcagtgggttaaggatctggcgttaccgtgagctgtggtgtaggtcacagacacggcttggatctggtgttgctgtggctacagtgcaggccggcagctagagctccaattcaacccctagcctgggaaactccctatgcctcaggtacggcctaaaaagacaaaaaacaaaaaaacaaacaaaaaaacccaaactccatctgagtcatgcgagacctgcagtgatgtcaggcaagagttagacacaactgggtgctcagagaaaacctttgggctaaagatataaatgcagtagtcattgtcccatgaatggtatctaatgccacagaaatggatgaagacagtgtataaagaaaagagatgaggataatggactcaacctccagaaactctaacacttcctggctgagaagagggaggggccccaatcaaggagactgacaagggagctggagaagtcggaggaaaactaagaggatgtggtgctacagaggctgagagatcttgatgtaaaaatgtatacagaatacacttaatatgtttcaggtagaatacagaggacacatttctataaatatatctataatatatttctataaatatattaattcagtggctcatctttcctgcatttatgcaagcaatttactttggtgccctgagaaggcttagattagtgctactacatatcaatattctttaaatatctgctcagcattcatttggaggagaaactgagccatgcatgggggaaagtggaaagagtgacagtgggtggctgtggtctttcacctctgaccccagtgattcagccctggctccacctctcaagtcccactcagtaaagcacaagtaccacggtcagtgtgccactctctcttgaagggagcttggtgactgtctctagctgatctatctggcccctggggagtctcacacctccccacatgcacacacatctaaggggcttatcaaagctctggtgggagttcccgtcatggcacagcagacatgaatccaactagtatccatgaggtcgccagttcgatccctggcctcactcagtgggttggggatcctgcgttgctgtggctgtggtgtaggccagctgctgcagctccgattagacccctagcctgggaacttccatatgctgcaggtgtgccccctcaaaagaaaaaaaagttatagtgcttccacattcttccacttccaggagtagcttagcattccatagatggctaccctgtgcccagctcctcaaataacacatggggaggccaaaattcccattctttcacactgacatggacctcccatcctaaaacagtaagaaacttgccagaacatactcagtccttccagagtccaagacccctcatgctggaatagatgctattctcctcggatcctcctcctacctctactgctgctcccactccgtttcagacttcttttcctccctcccctgaccctttaagtgctgatgtcagataagactcagctctgctcctctgcctggactctgatggctcctcttccaatgtctctaccacatatcttctgccagcttaaaggccctgctgtacactgacgattatgtctcccccaaattcgtgtgttgaaacccaccctcaatgtaatggtattaaggggtggggcattggggtgattagatcctgagggtggaaccctcaggaatgggatgggtgcccttagaaaagaagccctggagagctccctctccccttccatggcctaagaacacaatgagaagacgggcatgtacaaactagaaagtgggttctcaccagacaccacatctgctggtgccttgatcttggacttcccagcctccagaacggtacaaaatacatttttgttgtttataagccaccccgtctatggtattctgttacagtagtctgaaggtctaagataggctctccatgaactctatccaaatgccccacaggtacctgaatccacctacatccttaatcaagctcatcacctcccctattcctagacctgtatctcctcctccagtccctttcctggtcaacggcaccagcatgcaccagtctctcaggcctcccagtcatcccggacagcccccaccttctcactcccttccacatcctttcaagtcaggttaatcacaccgccttaccaatcttggcaaatgctagtttcacatctagtgcccctataggactgtaaacttcttgaatataagtgtattgattaatttctcctgtctgtctcctgtgcctaacacaatgtctagtaccgtgactcatagtgaaatatatcctacgtcacaaacacatgcacatacacatatggaagcaaaaatgccactaaacaatacttatccttacttcatgagatgccttctgatttcctatttggtttcaatttttgacccttaagccagtttctaaacacattaatggatcaaataatagtctgacacacatgggctagcatatcataggtgttttaatgaacattgttgtatgcttgcttagagtgtgtgcatggccttgtaaggttttttaatcatcactgccattttattttatttttatttttttagggccacaggtgcagcctatggaagttcccagtctaggggttgaatcggagctgtaattgccagtctgcaccacagccacagcaacaccagatctgagcctcgtctttgacctacaccacagcttgcagcaatgccagatccttaacccactgagtggggccggggatagaatggatactagttgggtttgtttccactgaaccacaatgggaactcgcgtcattgccattttacagaggagttaaccgaacctaagaattttctttatctgattctagattctgtggctttccacagcaccccatgggctataggacctctcctagccccagtatttttttgctttttaggggctgcacccgcagcatatggaggttcccaggctaggggtcaaactggagctacagctgccggcctaccacagcaacgccagatccgagccacgtctgcaacctacaccaccggtcatggcaacgcgggatccttagcccactgagtgaggccagggatccaacgtgaaacctcacagttcctagttggactcatttccgctgtgccaccacgggaactgctagccccagtattttgtgattcatctgttgccattggctaattgctgtcagaatcactatgttgttgcgcaaacatttgagtcaaaacatccagactccccacctcccgggatgccacgccagtcactcacacacacacacacacacacacaaaatccggaccctgttttaagggtctaatagatgctaaaactctgtctcccctgtcgggaatgttctcatggccctgttgcctacacagcccctgccacctcctgctgagctgtggatttactgaaatagggcaacgcttcttttcttactcaggattaaaccagtccactagcggaagctctcctctgttgtcttcttttctttgttccttttcgttgcctatagcgtcttcttcttcgtggtaactgtgagtcctacgtacaaacggaaaacaagctgaggaaggcagggagggtgacccatgtgccagaatgagagtgaggatcttgtgaaaacagattccaaggcagagaacacgtgcgccaagcaaatgtctacagaaggcttgtgatactaaacatttattcgtaaagacgtccgtctgatgaaaaggttcagtgctcccctttttcatcatccttccagaccagcacagttagcaatgtaatgacccagcaattctcaggttctgtcaggagcagggaaacctgataaaacagtccttatcagcgtatgtaagctcatgacagcctttcctgcagcctcaacttcagcctgagcctcactcactcccacatcaaatgggaaaaaacaaaaccttgaaaaccaaacttaatgcccatccccaccacgcaacagagtccttgcatgattccaataagccagaaggacgaggcgactgagaaggtcatggctgtgaaaccattttatttggactctacagccttgagcagatacacagatggccgtttcccagtcttacccattgttaaaccagctcggaaaccaccagcccctctgagcactgctgccaacttctgggtttctaagaaatgaaaaagatgacaaacattttttagaaaatgaggcagtcccaaactggggcagggggtggggggtgttccaaactctttttatggcagatcacttaaaatcattttttaaaaaatcactaattcgtaaaatgaacagaaatgaagctgctccagctgaatgactgaggatggacccgacactccccagatctcccctcccttgggtggcccccggcactccgctggtccagggagccctcgcaggaagagaaggggagaagaagaatgacaagggggagggcactaatccataaatccaagtcctggatctgcccctttcctgttgtgtaaccctgataggacatttttcctctctgaatcgccattgcctcctctggaaagttagagaacaatgacagcaccaaacctaccatgaagatggatggcttcgaagactaaacaaagtagcctacgtaaaagagctttataagctgaaaattactgtagtaagttgtagtcttaaaaaagaaaagcccacatttccaagaatgatctcttgctaaatgaggagaactggagttgctacaaaggtcagcagtgacagattcaggaaacctgagggtttctaaacccgaagctcagcaaactgtaatcagaagccgtttttctccacacacatgctcagatgtccacactcactgtgagagtctctccaaggcgtggaccgtctagaggagggacaagagggggaaagccaggagctgccatgccctttggttggacaaatgaggtggtgaggcaggaataggcatagtagtaagaaacttactttattttactttattattttattttttttgtttttttagggccgcacccgtggcatatggaggttcccaggctaggggtctaattggagctgtagctgccggcctacgccacagccacagcaacttggaatctgagccgcctctgtgacctacaccacaggtcacagcagcaccagatccttaacccactgagcaaggccagggatcgaagatgcatcctcatggatactagtcagatttgtttgcactgcgccacaactggaagtccaagaaacttaaagtccatctactttcaggaagtgcttgaaatggcttatgaagaaagtgtggttacgataaataggaaaacaatacaagaatcaaaacaaaacaaaacgaaacagagaaacattttagtcactcgggtgttttcacatgactttggtcatcccagccactctgtgagaacaaaatctttaactttatttttacttcatagctaagatattggcaaaatgagtttgagcaaattgccaagatcccatggcatctaacaaaagccaggatttaacaccaggggataaatcatatcagatgaaggctactataaatcagctatactttaataagaaaaaatgttttaaaaaaaatgaaggccaaggaaaatgcaagcatttaagcacaatactttgctctaagcttcctagcaaccaagtcgaagataggaaaaaaaaaaaagaaaaatgaaggcttagagtccttaatcaccagtaatagtaataataataaataataataatacacacactagtttatcaggacacccagcctttcttcctaatcctttgtcttggcaaaatttctggcaagggtctttataccacatgtagtaggtagcataatggataatatctactctgattcttttttatgagcaaggcaggaatgttctccaaacaacatcacttaaagagatagatacttgatgagaagcaaaggaaaaacacaactcatgctctagaaaggcaagtctaggggctggagaagtacagctcagacccctggaaccccatccctctcctccacctaggaccacaagtgtgtcaccacctgccatgttaagaatggactgtagggccaccagggtcacatggaaggtgacctagagatatctggaattcaaagcacttactttgactggtatatccagaacaaagaaccttctgggctaaaagcaaatggaaataaaaacatatcatgttacttggaatgcagagaaaagctattttgcaatcattatcattgaaaccctaggctgagctgagagcctgggttgtggctactcccaggtttccaccttcgagatcgaaaaaatgatatcacgggactctcgtcatttcagaattactcagatcaaacggtgggagggaggtctctggaaaatatcaaatcttagtttaaagaaaaaaaaaatagatggcagctcttattgtccaaggtggctttgctgagggagagaggctccagagatgggtcccaggaagaccacagcccacccatccctcacccaggatttatcttcctccagaaaaacaggtcttgcctcgctggctcaaagctgtctacagagtagcctcaaagggcacttctaggagttcctgctgtggcatagtgggttaagaatctgactgcaggagttcccatcatggctcagtggttaacgaatccaactaagaaccatgaggttgcgggttcaatccctggcctcgctcagcgggttaaggatccagcgttgccgtgagctgtggtgtaggtcacagacaaggcttggatcctgtgttgctgtggccgtggtttaggccggcgtctacagctctgattcgacacctagcctgggaacctccatatgccgcacctagaaaaggcaaaaagccaaaaaaaaaaaaaaaaaaaaaaaagaaaagaaagaaagaaaggcagaaaaagaatctgactgccgtggcttgggtcgctgtagatgcacaggtatgatccctggcccagcacagtgggttaaaagatgtggtgttgccgcaactgcagctcaggttgcacctgtggcttggattcaatccctgacccaggaatttccttctttctttctttctttcttccttccttcgtggaatttctatatgccatgggtgtggccattaaaaaaaaaaaaaaaaaaggtacttcttaagctaacaaaagcagtgagaccatcctacaagacgggatcagtaaatatatgacgactctagcagaccgcctccattcattcaacaaatacctgctgagcatgcgttacatgtcaagtgccagacatacagtgttgactgaaacagacaccatgtgtctgtggtgtagagaagctggcagggagggtggaccctattttgataaacacatcattataggacttcaaaactccaagaaagcataggagcacttaacaggaagacctcgaaggctccccaggggaggggatgatgttttagctgagttctgaaggatacataggaggcccagtgaagagggattagcaagagtgtgcctaacagagagaaaaacatgcaaaggccccaagaaaggaaggtcgcatatttatttatttattcatttatcttttggggttgcacctgcggcatgtggaagttcccaggctaggggttgaattggagctacagctgctagcctacaccacagccacagcaatgccagatctgagctgtgtctgtgacctacaccacaactcacggcaatgccggatccttaactcactgagtgagtccagggatggaacctgcatcctcatggatactagtcagattcgtttccactgcgccacatcggaaacgcctgccctcatctcttaaaacagaaacaaaaaaccactaaccactaatatttgtttgagattctgccaaagccccgatctcctccctctgccttctgccccagctgggagtccacatctcctggtaggaatgaaatacatgccttcctaccacctatggtttcccctctaagctcagtacccatggacccagctctaaagtcccttgtttctaaatctgtctattgatctgataatattcataatagctaatagttggctggggacctttctaagcaactgacatgtattagctcattaaattctaataacagtcaatgaaggaggttctattcctcctcagagggacagaggcaataaattattttgcccaaggtcatactgctaagggaagaaacagtatttgaacctggggaatctgacttcagatcctacaagagggggaagggaaaggggcaagaggagggggagggcccgtgccacccagcactcaggagccccaccctcctgccgaggcactcagggcatcaatttatagatttggatttgccacctcgtcccatctttttagtaacccctccctcttcctcatctcaccctcctttcccagaagccttcaacacctcaggtcacagcaacaaccaccctgaagtgtacggcatttaacacatattcatccttcaaggcacagctcggatgccatctcttctgagccttctttggtatgaacctagcacaatgcctggcatacagtaggtgctcaataaatatttctaaatgagggagttcccgtcgtggcgcagtgcttaacgaatctgactaggaaccatgaggttgcaggttcggtccctgcccttgctcagtgggttaacgatctggcgttgccgtgagctgtggtgaaggttgcagacgtggctcagatcctgcgttgctgtggctctggcataggctggtggctgcggctccaattagacccctagcctgggaacctccatatgcctcgggagcagcccaagaagtagcaaaaagacccccccccaaaaaaataaatgcaaaacatagatccatctccaagccaaacataatcttgccctccctgaactctcacgttcctttgctctctctctctgacatcctccttctagcctgtgttgttgggctttcatgggtacctctgcctgctccatctacagcataaccccttgagggtagggattctccttggcgcacactgtacccctcgcagcatttggcatgaacaaccagctccagaaggagccccagatgatgaatcagaagatctgagttctaattagaagttagacataagttcactgttaaggcatttcacctacttgtccatcgcctgaacaatggaaaccttgactaaaggaagggttacccaggttacccaagtcagacagccctggacctaaatcttcctaaaaatgtgaccttgaacgttcacatttaatattgtggaaactcagtattcctcatctagaaatgtggactaacactgaccttccagggctgttttaaaaacaggagggaatgaacagtggagttcctggcacaagcaaacactcaataactagtagccgctaacatcaaaatcaccatcaccatcattactttattatagctcttaaagtttcttccacctctaaaattctaagcttgtggctcagtggcttaagaacccaactagcatccatgagaatgtgggttcaattcctggcctcactcagtggattaaggatccagtgtttgccatgagctgtggtgtaggtcacagacggggcttggatctggcgtggctatggctgtggtgtaggcagctctgattccacccctagcccaggcatttccataggccacaggtctggccctaaaaagaaaaaataaataaataaaattctaagatttttttttttttttcatctagcctttaaccaaatgctgtcctggatgacattcttaaacagctgtatgtgtttgatggagttattttgtaaatctctttttttttttttttcaagggccttacctacagcacatggaagttcccaggctaggggtcaaatcagagctgaagctgccagcctacaccacagccacagcaacaccggatacctgacccactgagcgaggccagggatcgaacctgaatcctcatggatactagttggatttgttaccactaagccacaacaggaactcctgtaatcctctttagctacagtgctacccacctgtctaaggttagtgccctcagctcacctcagaccaattcacaaggtggcaaagaatctcctgccttttaaaccccttgcagatgttcaaatagattcctcacattgaagaatgatgtggctgcagtctgggtgccagactacggccctgaagagcagccagaatctgctccagttactgtgaagagagagtgtgcccagcactgcaaaacaaccctctttatgggaggccagcaccaatatgcacttctgggcctttggcttctgtgttttaattttgtgaagtacccaaaatatggaagtataactctggctgcaattcaaaacaatcaagagttcagagcttgaaggttgcctacacaagcatctcaactcaggtcaggaaccccatggggaacttgctcttctgttagattctttcagcccctagaattttttctttttctttttcttttttctttgtagggccaaacctgtggcatacggaaattcccaggctaggggtagaatccgagctacagctgccagcttacaccacagccatagcaactccagatcctagccatgtctgcaatctacaccacagctcatggcaacactggatccttaacccactgagcgaggcgcgggattgaacccgaaatctcctagttcctagttggattcatttcccctgcaccacaacgggaactcctagaactcttccttctatttgccaaaatctcctgtcctatgctgccctccggacagatggtgatagtggtggtggtgatggcagccagcgcttactaagtacgttgcccttagtgctttattcacaacttattttatccaacaaccctatgaagcaggtactactatcatccccatttttaaagatagggaaacttgcccaaagtcacagaggagggaagtggtggcacaggaccaaccccaggcagcctagctccagcctccactgagaatatctcctcagtcctcaagtacctaagggagccccagggtctctgcatccaacgctgtcatcttttcttcagaggaagtaccacagtttcctcaattcgaaaaggttggtttgtagacatttgttcactctctagctcgtcttgtttttcttaaaatgagttcttcagaatgagagggaataactgttccagaagtggttagatctatgaagcatccaaaggaatgacagcttcttattctagggaatccacctcctcctttttttttttttttttttttttttttggctgcacctgcagcatgcagaaattcctgggccagggatcaaagccaagccatagcagtcacctgagctgctgtagggacaagactgaattcttgaacccgctgagctaagagagaactccctagagaatcctccttctactgatggacctgaagatgcagttcctttctaagtggccaaaatggtcctgctggctcatcaagtcttagaatttaagagacattctaacgttaatccaggccatcatcctgaacttgaggggctactaaaacactacccatcaaaatatcaatggtgatgacatagctctccaggccaagttgttttttggttttttgtttgtttgttgtcttttttccttttagggccacacctgtggcatatggaggttcccagactaggggtccaagtggagctgtagctgccggcctacaccaaagccacagcaacaccagatccaagctgcgtctgcaatctacaccacagcttacttcaacacccgatccttaagccactgagcaaggccagggattgaacccacaacctcggggttcctagtcagattcattttccgctgcaccaccacgggaatgccttcaggccaagttgtaaggtggcctttttgaaagaaagtccaagcggtatcaatacctcttaagtcaaagccatcatgcattttggtagctgcttgcagacatttctttctgtcagaagcgtctccagctggaatctccaaggcatcgtagtttccaaaagcaaagaagcagcgtcaaatatttggggtgaatccactgatgaatttgaaaactcagaaatgtttaattcattttgctttccagagttaaaaaaaaaagacaaaacacccaaaagtttagccaggcacaaatgaatcaccagcgactcagtgtgttttgcagcaaaagtcaacaacttgagttgttcctttaaactctgcaaatattttaggattgcaaaaatcagggtgtatttctcatggaattcctgtctgaaagttctcaaggtaacttccatatctggtcatataaataatttaatattatatcttggtcttaacatgaccttattatttctggctctagcctacccagaactgcagaggtataaaaatcaggacaatggcaacatggcaggaaggaagataattaattagctggaaggtacttgaagatctaatgactttaaagacggtatttaagggctcagggatacaggaagggtagaatattttctttctttctttgctttttagggccgcaagtgtgggatatggaagttcccaggctaggggtcaaactggagctgaagccaccagcctacgccacagccacagcaatgccagatccgagctgcatctgcaacctacaccacaggtcacggcaatgccggatccttaagccaaagagcaaggccagggatcaaacccacctcctcttggatcctaattgggtttgctgcccctgagccacaacggcaactctctggaatgctttctttacggtgtcagtgaatcctacttttaatgcaagctggtgacttggctgataactaggagattagaggagactttcatcaacatcatttcatcatgtttcataattacctgttgatgtattcccaaaacacaaccattacagttgagacaagcagcattgacagaaccactcttcctttgacattcattattttctcctgggaaaagaaaaggagaagggaaaattagattaaatacacccagagtggaatatggttttttaagaagtgcttataccaatatcttttctaaaaggaaaagttgatgaatagtcaacgagcgctaaggagtgcgttctaccttaatttgcataggcctacactggcaaattagccaagtcaatgaactgacagggccgtctgggttgggaaggatactaaggccattttgaggctcaaaggggaagcatcctgactgatcccaaggtccaccgagatgtgggagagtgacgggtttagttaatggtccctaagggctccagccgcccccaactcagatgccccacctcgcatcacagactagaggaagcatccgtttcctaggtctactgtccctgatatactgactatgtaccttatcctcaaagaaaaatataccctggtcctttatttaatttcatttaaattttagggccacactcacagcatatagagattcccaggctaggggtcgaatcagagctgtagccactagcctatgccacagccacagccacactaagtccacgccttgtctgcgaactacaccacaactcacggacagcaacgccagatccttaacccactgattgaggccagggatcaaaccttcgtcctcatggatgctagtcagattcatttcagctgagccacaatgggaactctcaccctggtcctttataatctaggctctgccacttcccacccagcttttccccaatgcacccacacaagtggcaaacagtcggtacattcgtatttcttgatcgctgcatgaaattgtagttgaagagggaagggatgctgggtggaataacaggttgcggagtactttaatttgggtggagatagaaagatatttatttcaaatggaaaggacaagaaaagtgtggcagctagccacatatcagcaatactcataaacaaagaatgtaacaaaagataaagtagggcattacataataacaaagggatcaataccagaggaagacataacattggttaacatatatgcacacgatatcagagcacctacatctagaacgcaaatattaacagacataaaaggaaaacttgcacaattacataatactagtagaggactgattcgcaacattttgtgggtcttgtgatttttttctttttaggtctatttgtctttttagggccgctcccgcggcatatggaggttcccaggctaggggtcgaatcggagctgtagccaccggcctacaccagagccacagcaacgcgggatccaagcctcattggctacctacaccacagctcacggcaacaccggatccttaacccactgagcaagggcaggaattgaacctgcaacctcatggttcctagtcggattcgtttccactgtgccgtgacgggaacgccaacattttgtgttttagatgtcatagtttacatcttcacagctatccttcaactatataatttagtcttttaacatctgtactagtttatttaagtgtttgatgcaacaccttcactatatatttgacttttctagtcttattatttcctttctgtattttctcatatcttgttacagttttttctttttcatttaatgaagacacaaacatttcttgcaagtcagtgtagtagttggaaactcagtttttccttctgggaaactctttagtcacccttcaatttggggagatgactttagagcttcccaagggatgaagataggatgggaaaggatgacaagggccgtgagaagggatgagaatattttggaaacagcatctataccaggcagacaagagaaagagctgctcgtgtttgaaaaaaacaaaagcaaaaaacctggacaagaaaaaaatagtgactgacactgtcccccttgagtggctggtgctaggcagtcagaaggggggcagaggcagtcagaacctggaaaggtatggaaagtagggtggggaatcccaaaaagcatctaaagctggagaatcccctgatccaacttcacctagagagacccatctgggtgctgagtgtggagaatggagaaaaggacaagggcagaccgttctcatgaccataaagaggaggtggcctggctcaaagggtggcttgattcaaaatatactttgggagttcccgtcgtggcgcagtggttaacgaatccgactaggaaccatgaggttgcgggttcggtccctgcccttgctcagtgggttaaggatccagcgttgccgtgagctgtggtgtaggttgcagacgcggctcggatcccgcgttgctgtggctctggcgtaggccggtggctacagctccgattcaactcctagcctgggaacctccatatgccgcgggagcggcccaagtaatagcaacaacaacaacaacaacaacaacaaaaaaaaaaaagacaaaagacaaaaagacaaagaaaaataaaatatatactttgacaaataccatatgatatcacttataactggaatctaatatccagcacaaatgaccatctccacagaaaagaaaatcatggacttggagaatagacttgtggctgcccgacaggagagggagggagtgggagggatcgggagcttggggttatcagatacaacttagatttacaaggagatcctgctgagtagcattgagaactatgtctagatactcatattgcaacggaacaaagggtggggggaaaatatacatgtaagaataacttgatccccatgctgtacagcgggaaaaaattaaaaaaaaatatatatatatatactttggagagagaattgataggacgtggttggtaattttgttatcagagatgagacaaggaagacccaagatttctgcttaagcaggggggttgtagtattttctcagatgggctggaggaggaacaggcttggaggataataatcatgaattcccttttggacgtgtgaatgtcggggagtgtgcgaatacctaaaaggggacagggagacaagtggacattcaagtctaaagttcatcagagagatgtaggcagaccatgcaatcggagaagttgttcatggaccaaggaacgtatcggatctgacgtgaagggaacgaatttgattacccaggagagaatgcagagagagaaagaggaagaggaggatgctgggctgaagctttagaggtaggatagaggagggcccagaaggagaggaccagaaggtagcagagacagaagagtggacacctgggagccaatgtcactgcctttgtgaagccacttcccacccccaccctgaccacggctgaagcccttttctctcctccggcccccatccctctattcctttgctgtacacatcgccctgggagtcggctcaccggataagacctgcattttgctctgcctcctctacctgcttgtttgagcttcctgagggcaggagggatgacttcttcgtcacccctgaattcccagtgccccacagagagcagagaaggccgtcaataaataatgagtggtttgagcttcctgagggcaggagggatgacttcttgatcacccctgaattcccagtgccccacagagagcagagaaggccgtcaataaataatgtgtgggagttcccgttgtggctctgtggttaacgaatctgactaggaaacatgaggttgtgggttccatccctggccttgctcagtggcttaaggatccggcgttgccgtgagctgtggtgtaggttgcagacgcggctcagatcccgtgtggctctggctctggcgtaggcctgcagctacggctccaattagacccttagcctgggaacctccatatgccgcaggactggcccaagaaatggcaaaaagacaaaaaaaaaaaaaaaaaaaaaaaaatgacgtgtgaatgaaatgagaatggcactgagatgtgtcctttcaggggacgggttattctccaaatatttgcagagagggttctgaggtgactccaggcttagatctcaggtgctccatcacctctgttgtgaaatccagttaaagaagagaaagtatgggattatcagccatgtcactctattccttcttgcttggaaagtgagctctgtttggaaacctctgattcaatcgccacctttcggatacaatcatgataggtggtgttccagagacggtgagaagatggggagatggagcttctttcctgtgagcacctcaggtcctggcacaaacagcccggggcccagggcaaagttacgaaatgcacggggctacatgcagctcggcccagatgctggaaaaagccacttgactcctacaccaacagcattagcactgagtgcgaggaaaggcctgggtttgggagcagacagatcggggtggagactgtggccactgtggccatgcctctctgccgttgtcttcactcccagagaagtgtgggtggtgagagagcttgggaaggaggtggggtctggagacacccacagactgggtaaccctgaacatggagcagtttctcagaccctcatccaactccaagctctgaaaaccaaaagcctgtttataattcagttggcatccaggccctgacacgaggctatttataatctttatcacttagtgagactgtttaaacatttctttgcataaatattgatgtacattgttatgtgctgttgctgcactggaggcgttacataatataggataaatattctgcatttgaaaaattctaaattccaacatatctggccttaggcattcaggaaagggatggtggacctctaattgatcacattagatgggtctcctcatctttaaaatgggaattaaaatggtgatgactgcaagagatggtgtccataaaatatttagcatcatgcccagcatcatataaaagctcaaaaactgctagtttgtattactggtatccataaaacaggctgttgggaggatccagtgaagacagcacagcgcctggtacttagcaagagctcaaaacgtatcggagggaaaggaataagcattttggaataagaatgtgttaaacaataaagtacaaattgatgcaaattagggcctctaaaggtttatccatctgttctatgctgcagactgactaaaagctcctgggaaatgccacgcaactttgattttctttgatcaagcccaggccatccaaagccttgtcatccccacctgctgaggatcaaaccctgtgtaagaaatgcgaaagagagaaacacaaactcctggcagagaacggatcagggagaagctggtataaaatcagacacacctcctaatcctttctccaaaggcaagtgtttttctgtttgttttggtttcagggtttgtttgggtttttttgttttttggtttcttttggtctttttaaggccacactgggagttcccctcctagctcagaggttaacaaacctgacttgtatctgtgaccattcaggttcgatccctggacccgctcaatgggttaaggatccagtgttgccatggctgtggtgtaggtcgcagatgcggcttggatccagcattgctgttgctgtggcgtaggctggtaactacagctctgattcaacccctagcctgggaacctccatatgccaagcatgtggcacttaaaagattaaaaaaaaaaaaaattaaggccacacccaaggcatatggaagttcccaggttagaggtcaaactggagctatagcttctggcctatgccacagccacagcaacgccagattcaagctgagtctgtgacctccaccacaactcatcacaacatcagatccttaatccgctgagtagggccagggattgaacccttgtcctcacggatactagtagggctcattaccactgagccacaatgggaactcctttgtttcatttgtttttgatttttttttttttttttttttggtcttttctagggccgcatccacggcttatggaggttcccaggcaacgccgcatccttaactcactgaacgaggccagggatcaaacccgccacatcacggttcctagtcggattcgttaaccactgagccatgacaggaactcctgtttttttaatttcagaaattagcatcagagacaactcttgaagcccccccccccttttcttttcctctggaccgtaaacatggcttgaatctgcttacttttcgctgtggccaggcatcactcttagagacttacagttggaagccacccaaatgagccaatattgcctccttttgaaaagcactgggaaggggtatatgcaagctttctggaatctggaaccctagtgtctcaggaaagaagggttgccagaatggccaaagggtttttaaaacattttttttttttctctggattaaaatgaggcatttggcagcccatgtggtctaaagcccttcacggatgtgtttgtcacagaattttctaactctctaattctcaagattggtggttgactatcttacccaccaaataggaaaagtgggggttgcttctacatttctcatggaagagggagagcacaggattagagcctagagagcactagcaccctgtcttataagggagagtgtaaccacctcagcaccacctgggccccagccctcagaggatcaggtgaacccagcgggcccagttccacctgagccctcccaccatcccacaggccctcctgccaaggcgtttgccatttctctctgctcctgggccactcccacaactcagcccctgcagcggtttccaaaagaaaccacttgcacccccactcccgggcctcgtgcagactgtgctaaaacccagtgcatttcccaaggcagggccacgctggaaagcctgtcatttctccaccttcctcctcctcctcctcctcctcttcggcttctccatccctggggtatcagactcttccccaaggcccataaattaatccttcctgacccacccctaacttgtcccacacagaacggtacacacaccccctccacttcagagaagctcatggtttcaccgcaactggtccaagtcaaggttttccttccagacagagttccactctgaaaggaattctagtggccctgtttttctccacctcgtgtcagggggaaaggtgagcacctcagctgaatcacagagctctcagaagccctggaaaagccattatcttgagagagcagcgagcaagcagtgacagaggaaaccaaagcttccagcagactaaagaatcttcctctctgcctgtgactcttgccctgcccctggaacccatcctgccctgctagctccacaggaccctggcaagggtcaagaaagtcaggtagtgataagtgcagcaaatgaaacacagtgcgggggagggagccaaggtggggaagccgcaggaactgactgggtgttactcaccctggacaaaaacctcctatttttaggcctaacatttagatccagcattccaggcagaaattaggccggtgctgggactggaatctgcagccctacatgcacttgccctgggcaagtcctctggctctgagcctctacttacacagaccaaacggagcttcaaacaccctcctccagggctcttgaaaggacaaaaggagaccccgtctatgaagcatgttgtgcctgatgctcagtaaatgctccacaaatgcagccagaacaagggcgatgctttttacggggagagattcagaaatgtgtggctctgacggccgagctgtggctctgtctgagaggagtctgggccctccagggcagcaccacacagaagggtccagggcgagccccccacgctgttgtgactgttgttggggccagctcagggtccccaagcgcatctcgtttgcctctatcgcctggcgcgcatgttgggcagggaaggaaagtcaggctccagggtcaccccagcacccacacagagcgggtttgtgaaccacacgcagctttctctggcctcagtctccccgtcctttgaaacatgtcctgtgggcttaacttccctgaatgagccaagacctgtatgagaaggcagccacagagctggaaggctccttttatgaggacaggttcactggagctcaacttgctgcagtggccacagattcctagaagtggtgatcaaaagataggattgccagagtttccgtcatgacgcaacggaaatgaatctgactaggaaccatgaggttgcgggttcgatccctggcctcgctcagtgggttaaggatccggcattgccatgagctgtggtgtaggtcacagacgcggcttggatcctgtgttgctgtggctgtggtgtaggctggcagctgtagctccgatttgacccctagccaggaaacttctatatgcagcgggtacggccctaaaaagcaaaaaataaaaaaataaaaataaaaaaagagataggattgcccacaaaatgtgttgagccctcaggccacttcacccagaagcctccgggtcaggcccccaggcaggcctggggtgtggagtgggcaaggcccaaatgcttcctccaggtgaggtgctgcccctgcctgggggaatcgttccagcctgggtgcctgtcctggggctgcaggtggagcccaggtactgaccctgctccccgcacctacctgggtcctaggagcaacctgccccatccaggtagaccttgctgagctccttggagcctctcactttgatcccaaggagaaggagctgaacatgatgctacttggctccctgctcacaggtcacgatccagacctcacaatcacctggtggtgcaccccccactccagccaggatcaaagagctgaattctccaggactctggctggacccacctgagcaagaaactgccaaaagatggggcgtttgaaggacctggagcacctacacaccccaagctttcctcatggtttcagttacaagatctgtgtttggagacctccccttgggggcagggaccatggaaaagttccagctgcaagcagaccagctgggagtggaaatcatctcctcgggctgcaccatcacggccctggaggtcaaagacaggcaaggcagagcctcagatgtggtgcttggctttgctgaattggaagggtacctccaaaagcatccctactttggagcagtggttggcagggtggcaaagcaaattgccaaaggaacatcacgttggatgggaaggagtataagctggccaacagcctgcacagaggagtcagaggatttgataaggtcctctggaccccttgggtgctctcaaatggcatcaagttctcgagggtcagtccagatggtgagttaaaagtctgggtgacatacacgctagatggcagggagctcatggtcaactctcaagcacaggccagtcggaccgccccagtcaatctgaccagccattcttatttcaacctcgtgggccagggttccccgaatatatatgaccatgaagtcactatagaagctgatgcttttttgcctgcagatgaaaacctaatccctacaggagaagttgctccaatgcaaggagctgcatttgatctgaggaaaccagcagagcttggaaaacacctgcaggagttccacatcaatggctttgaccacacgttccgtctgaagggatctaaagaaaagcaatttcgtgtacgggtccatcatgctggaagcgggagggtactggaagtgtataccacccagcctgggatccagttttacacgggcaacttcctgggtggcacgctgaaaggccagactggagcagtctgtcccaagcactctggtttctgcctcgagacccagaactggcccgatacagtcaatcagccccacttcccgtctgtgagttcaaacacaccccttggttctagttttctgtggcctaaggaaatgtaaagatatgacctgttccagggtcaggctggaagccccttcaggaacctgtctcctacgcagagataagatgaagatttagaggttttaaaagtgatcctgtgtattactcagccattaaaaggaaagaaagaacggcatttttagcaacagggatggacctagaaattatcatgctaagtgaagtcagtcagacaatgagacaccaacatcaaatgctatcacttacatgtggaatctgaaaaaaggacacaatgaacttctttgcagaacagatactgactcagagactttgaaaaacgtatgctttccaaatgagacaggttgaggggtggggggatgcactggggttttgggatgatcatgctataaaattgcattgggatgactgttgtacatctataaatgtagtaaaactcattaagtaataaagaaaagaatgtaaaaaaattaagaaacagaaaaaaaagtgatcctgtgaattaaaattacacaaatggtagttgtcatgataatctgaatattgatttctttcacaatgactggctccaggccaagtctaatggtcagctctattctctgtgtagtgaaaaagacccaaccatcaatgtcatcttctaagccctgaccctaatccagaagtggtacccagatccttgtgttggctctgtctctccactctgcttcttttcactccttctttctttgatcctactcattcctttttcccttcctcttctacctcataccaccttgatctgtgcagcactttggagttttcagaggtcactgagctcattcaacctggtggtagagggacctctctgcctcagtaaaagaatagatgatgaagtgagccacctgagaattaggggaggtaaatgacccacctaaaggcgcacagccaggaaaaatttagcctggattcaagatcaggtcatgcaaattcaagtccttctttgcctccacttcagtcttccagagcattcctggagtcattaatgggaaaagggggggtctgacccttactctgttaaagccagaccttctttccagatatcacttttataagaagccctagtcagagtttaaatgtatctctgagccttataaatagtgtgacttaaaatacaagatctaaatatccagaaaaaaaaaatctgtgaatttgattctccgcctttggggttactaagaaagcccagcctagccaagacatgggaaggaagccgctggagacaagagctgtgtgagttcgaggagagggccttgctgggactgcacgctgcaccgagagcagactgtatttggtatacgaggcggagttccctcctctcctaaacaattgaatcacgagtgatgggtttgtgttgatggtttttaaagaaatgttatcttatactcctctacactaataatcagttgaaataaaaccaaaatgtgcaccctcagaaaaaaaaaaaaagaataaaaagaaactgccaaaagactgacagcactaataacaagttatgaagctgaaagaagcttctcaaaactcccaggaataaaaagcaaccactgattaaccatgctagaggcagaactgatttgtcttcctttttgtctctcttaaaaatgatactacaggagttcccgtcatggcacagcggaaacaaatccaactaggaaccatgaggttgcgagttcaatccctagcctcgctcagtgggttaaggagccagggttgctgtgatctatggtaggtcacagacacagctcagatctggcgttgctatggctgtggcgtaggctggcagctacaggtctgattagacccctagcctgggaacctccatatgccatgggtgtggtcctaaaaagacaaaaagaaataaaaatgatactacaaaaatcatcagataaagagatagttcaaagtatgcagccaaaatatgagaggtacatcagacagctgagtaatactaattatttttatattattttcacgtgttatggttgtttttctgaatttggtcctatttagagtattggtcagtctgtgttagctgttgggatggcacctcatattctaaatgcagtcagccttctgtatccatgggtcttacatccacaaattcaactaaccacggatggaaaatactccaaaacatcacattccagaaagttccaaaaagcaaaacttaaatttgctgcatacaggcaactatttgcgtggcatttacattgtattaggaattataagtaattgcaaggtgatttaaagtatatgggaggggagttcctccgtgggctagctggttaaggatccagtgttgtcactgctgtggcaagggttcgatccctggcccatcaacttctgtatgccatgggcaccgccaaaaaataaataaataaaatatatgggaggctgtgggttatgtgcaaatacgatgcccttttgtgtaaaggacttgagcgtcctgggatctggtatccgtggggtcctggaaccaatcccctgtggatacccaaagacgactgcattcaatccccagccaaatcatgtgtctgcaaatttgtgttcccttttcttaaagcaggccctcgatattgaataagcttcctgcagcacttggatgccccccagctgaaccagaccaggcctcaggctaaacgctttaccagaggtttctcagataagtctcacaacgtcctgtgaagtcattctagtgttatctccactttacagacatgcaaatggaagctcagaaaggtgaagtgacttgcccagtgtgtcacacagcataaagtgatggagctgatattcaggtccagagagctggcctcagggcccacccttttaactattctcagtaaacatgaagactcacccatggactaatcacccagggatctttggcacatcctctcattttgcctttcacgatgatcacttagcaattgacccaaagctagccaatcatgggctagactcagcaggggccagcttctcctcggcccagctggcgagcattggctcaactcctctgccatttccaggagcctcctgcgtgcctggtgtgagccttccccatgcacgccatcctattcacccctcatcatggtcagtgcgggggctttttagctgaggagaccgagctttagcaaaagctgagatcgctgggctcccccacaaggggggcgctgagtttgaaaagcagaccctctgcctcccaggcccagctcttggccgggggatggtgctggggggaaggagggagagtcctgctttatctaaaacctctttaaattggcttgcattacagggaaatgctccctgttggaagaaacatggtataatttggggggcaggggtggggggggagtagtgcacggaaggctgtttccagttatgtttttcattataagggtcaaagcaaacacagacgcaggaagctaagagacaagcctcagactaaacatacgaccagctgtcgctccagccatcacagacctgttctcggagggacatcttgtaggcccctttcttgaatccccttcaaaaatctgaagcctggatccagccagcttctccttgctgcctggctcagaaatcatggtgcaagagtttttccaagagaaatagggcgaggtacatgaaggatcggtgctgccctgagagggcactatgtccgcccccagcacaggtcccgggcctgagactcgtcctcctggccccacaatggcactgtgtggcccacacagagaaccccaggctgtagccacaccccgtgaggtcctgccgggcagccaacgaaagcagaaccaacagtgactgagccagcatcctgccagctcccactcctagatccgatgccggggactggaggactttgtcttctttcagaacaactggggggagcagcaagaagtcagggggagaggggggctcctctctccacgctgcagccagctcatgatacccacccccccggtgaccccagcaaagcggaggcaaatcatttcaacgtttcacgtacctcatcctctgcttctctccccccagagtaaaaggcgaagcaagttctagtgagctctgctctgcagaaggaggcagggctgggaggaagggaaggtgctgcgttccaactcctgtcaaaagaataaacagcggtttcacgaagaggagcgcagacggatcccacagcagccaggggccttgttcctccttgctcgccctgggaagtgggctgtttatcaggcctgttgactcagagctgcatgccaaggcagagacgtctctctccggcccaggatcggcccggcctccttcactaagcgaaactacaggtccaaactaggcctggtggtggaggagggacagccaccacccttgggagagacacacaggccgcccacatcacccactcctcggcgaaaatgagaaccattctgaacccaaaccaccccaaatgacaactagcagggacagccaatggagaatttaaaaagaagggggcagaaaatggagaggggtggctaaaggagagcatcctcaaaactcccgttgaaatgctaccttccgagcctcttgttcgcatcctttaggcttcagaagttgttctgtttgaacactatttttatagaatgttctgagatctcctgcatggcaagccaagctataagaacttcaaaaggtcactgaggcccaacccaactctttggctgaataatgcttaaccctccccacacccacctcctgctcccaaaatagaatttcctagctggaagagacctcacagcagtggatttgtaaatgtcgcaacagctaaagctttaaaaaaaaaaaaaaaaaaaatgaagtcattctcagaaccccactatgtaaaacagaggacacagggggctttggctgaaggagggaaatgaagtaagtaggggctcagagcccccccacccattcttcccaagtggccccagacacttcctgggagtagagcctagaaaccccagactaaggagaaggggccgaaacctgacagaaaggagccaagaactgccccctcagcttccagcggatggatgcctaatttagcttctcactcctgttctggggaagaaattcaccgccccctcctctggggcatgagctagttgaccacagtcttcaagatctgcttaataaactactgaaatcctccctgctggcatctactaaagctgaaccaaccacacctcatgttccagtcattccgccccagattaatacctgaaagcaagtgcatttaagttcaaacagagacgtgacctgggaccaaaagctggaaaaaccccaaggcccatcatcagccagatcaggtgtggtccaggtgagggtcacacacatccgtgagaaggaaccagccacagctgctgacatcaacagggtaaatctcacacatggtactgagtcaaagcagccctggatgcttgcatttatttaacgttcaaaaatagacaaaaccgggagttcccgtcgtggcgcagtggttaacgaatccgactaagaaccatgaggttgcgggttcggtccctggccttgctcagtgggttaagggatctggcgttgccgtgagctgtggtgtaggttgcagactcggctcggatcccacgttgctgtggctctggcgtaggctggtggctacagctccgattcgacccctagcctgggaacctccatatgccgcaagagcggcccaagaaatggcaaaaaagccaaaaaaaaaaaaaaaaaatagacaaacccagggagttcccatggtggctcagcagaaacaaatctgaccagtatctacgagaatgcaagttcgatccctggcctcactcagtgggttaaggatccagtattgccaccagctgtggtgtaggttgcagatgcggctcggatcccatgttgctgtggctgtggtgtaggccaacagccacagctccaattggacccctagcctgggaacttccatatgccccaagtgtagccctaaaaagacaaaaaaaaaaaaaaaaaagacaaaaccaatctgtggtgccagaagtcagagtgggagtggtagagactgggaaggggaggctcagagagctgctgggggagggggggggcttgtcatgttgtttctcgagccaggtagtggttatgcaggtgtgtccaccttgggaaaatgcctcacaaacattccctttcagtgtgtgtgttaaaaacaaagatgcacagaaatcttcctgctggaagctgccttctcttgggaattctgacttcccctgagtctacagggtctcagggccacagggtcatggatagaccccgttttttccttctcttgggttcaacgccccaataccaagcaccacagagcacctaagtacggactcagggaagatctttcacattaaatgatgcaggcagctggactgtggtcaactgggagggaaagttcacagcatttggaggctcaggaactgggctaagataaactggtcctttcaagaagcaagcacccaggagttcccatcgtggctcagtggttaacaaatctgactaggaaccatgaggttgcgggtccaatccctggcctcgctcagtgggttaaggatccagtgttgccgtgaactgcggtgtaggttgcagacgcggctcagatcccacgttgctgtggctctggcgtaggctggcagctacagctccaacttgacccctagcctgctgggaacctccatatgctgcaggagcggccctagaaaaggcaaaaagacaaaaaaacaaaacaacaacaacaaaaaaaagcaagcacccatcatggttgccaccttccagtttacaaagcagcctctctcctttaactcagcaaatcctcaggctcacccgccccgggtcagggaagggagggaggcactgggagcctctgtgacttgctcaaagttgccggctggtgggtctgatgctgcccttcctcctgagctgcctctggggaacaccctacaggttcgtggaattagaggctccaggctcatgaatcagagcacgacagagtatgcaaacttggaaggcagaaaattcaacttccagaggatccgacatgaccttcctccttctccgacataccctgatgcccagactctcaaaacaaggaagcatgtacttccggtcattccttcatggagaggcagggaactgtagcaagtgagcctcaggtctgctgatcaaaggaggccagtggccatccaggtaggagtttggcacgtttcccagcccagccaggccgactaatctcatcactcaatgttccccaaggccccttccagccctaacagtccataggcctgtcagatgacagccagcattcagagcctgtccatctgccatgtcccctgcagaggagtgcagggccttggagctgcggctcagcagctgcagcccaggtgtgaagggtcccggcttcatgccccagaccccttccacctgagaaacacaaaggtccggattcccaccctgtgggagagggagaattaagtgttcttggcaaaaagtgctacagatacaaagattgcagctgtcacttttaatcctaaatacgtttagggcaggtataagacattcttgctgtcacttgtgagtgatggagcagtttagttggtttcctcttccgtgtggtgaggataattataatccccaccgctcggggtgggtgaggggcctagagcaccgtggttatgaatgtggactctgggcccaggctgccggagttcgagtcccaggcctgcccatgtgcgatcctgggcaatgtgcttaacctctctgtgtctctgtttctatggctgcacaatgggaacaacagcagctggatggtagctggcacatggtaagtgtctagagatacgtattacccgatattgcaagaattaaggagacacgcccggaaaagtgcttgaggtgctcaatcattgtccgtctctgctgttctattaatccgaggctgcagctccttggagtttacatttgtgtatcaaatagtcattttgaccacgtaaccctgcaggtggggaaaggtacggagggaagggttcctggcacgacgtttccgttactgttaagtactgccccccacacacgcctgtgagtatcagagctgaaacgatcttggcaaaagcccacataataaataacggcagtcaagagaggttgcatctataagtctatttccttgagaagagctggaaaaatgaaatcatgatgactcttcccaggccagtacattgctaatcatcttgagatctgcctctgccccaggtaactccaggacagactccaccaaagccatgctgaagcactcctgcctctgcaagcatccatcctgagcctcagccctcctcctgcacaccaggaagtccctctctggggctcatgtcagtccttcaagctctataggtcagactcttcctagagaagaaagaagctggctttgttgacagctggggagatgtgaggcgctcccacggaagggcgaggcccgggtactgatgacaccctgggcttgagcaccagcacaggtggctggaggatttccccacccaaggaaaccgctctattcctaccctctcttggtccttctcaccccttcctcaggccaaggaccccagatggaggtgagaaagaagcacctgctccttattcacaattgggcagtaggtgccagggggtacccttgcccccgaccccccacagaagttctcactctttcctcagtagagagaacctcaaagtcaggtaagtcagctccctgcctcaaagcaggactgctttttgaacacgtgataagctcatcttccgtcaaggtcacacccacgccccgtttagagcccactgccatccacaaaagccacataacatagaggctaagtaggagaaatattacaagcccaagttataagaaagggaactgaagatcagggaagaaacttacagagtcgtatggtctgagtcagcagccctggaatggaagacaagtttggggtctttctgtgagtctgtcccacctcagcctcgtacacccctggtggtggtgaagccagaccaagctggggatgctaacggaagcagaacaagaagagggtcatgaaccagattccactagaacccaagttctttggggggtgggagggagcacttgtcttctgtcttggtcacttctgggctttcctggtacctggaacagtatttgacatctatcagacgttcagtagatatttgctgaattaatgctgagtgaaagcctacaggagccaggcaggcagcagaagtatgtgaatttgaccaggtaaggatggactgtgataaactagccaaatcagatcaaaatcagattttaaaaagaaaacaggtttcccattgtggcttagcagaaacgaatctgactagtatccatgaggtcttgggttcgatccctggcctcgctcagtgggttaaggatccagtattgccaccagctgtggtgtaggtcacagacacgtcttggatctggtgttgctgtggctgtggctgtggtgtaggccgcagctacagctccaattcaacccctagcctgggaacctccatatgccatgggtacggtccttaaaagacataaataaataaatgaaaaaagaagtacccttctttgattacagaatgtgatatactggccatagatgactcctcttttaagggaaattgttttgtgccagaagcgaaaagtattgtttgaacccttgctccccaacctaggggatgtaggcgtgtctgtcccttctctgtgcgtctgttttctcatctgtgaagtgcaaggtccctcccatttccactccatcctgcctgggcctgagtctgagggtagagttgtgaactgggctcctatagcagtctgactgggggactcagaaggcttcatggaggaggggatgtgaccagacctttccagatgggcttcccctgcctcccagggatctggcatatcagcctgcacagccactcacccttctcttccttctcactgaagacaggctgaaaaactaacctgccgggggaggcaggcagccccacacttcagaatttataaatcctcctctgctcaggctcaggcccagtccatcctgggaggtgctggaggtcattttatgaaccaaccaccttcggctttcggggcgtagggatggggcaggatgccacagaatcaccagcccactcacgagcccccctgaacccttcccagggtgacagaaaagaggaaatggagcacaattccggccccaagacaaagaaactcggccaagcaaagagaagggaaacagcttcctgagtcaggggacttggaatctgctagggccacagggaaccttccccccatcatggtgaggctgaggtgtggactcaagcaactgagaagataaggacaggtgggtccgcccccacccagctcagcccagaagcatttctttccaaagcgcccgtggaaaggagtggtttgcagtgaagaacatttttcaaaaaaatcgaagtctaatactaataatataaccagataaaagaaaggccaagaaagtgccatataaatccaaagacacggttccacaggccacgtggccacaggcacatttttcccctcctgggcctcacgccccgtgtgggcactgacggagtcgaagtggaacattcccaggacccacctgggctcggtggctgtgaagagcctgttgttacttgctctgcaaacctggctgatgaacatgcagccttcagagcgcaaggtcacctcctccaagatctgcctcctggcacaagtggattctcacagccctggtgtggcctgctggtttcacggcacctagagcgcaggttcttggacatatgtccatctcactctctgcacgcacattctcaagggcagcagggaagtctgctttaggtcaaggtccctggtggtcctcaccacagggtctggtagagaggaggtcttgaggatcagtaggctggtgacagatggacagatggacttgctggggctactgtaataaagcaccacaaagtgggtggcttaacacagcagaagtttatcctcttatacttctggaggccagaagtccaaagtcaaggtgttagcagagctggttccttctgaaggtcatgaaaaggaattctacaggcttctctcctggcttctggtggttgccagccacccttggcattccttggggcagcataacccaacaccgtctgcatcatcacacagtgttctccgtgtgtgtcagcctccaaatttccctctctttagaaggacaacagtcactggattggagcccacccgaatccagcatgacctcatcttaatttgagtcatctgacaagaatctatttccaaaaaaactcatattcataagcactggggattcggacgtgaacccattttttttttttggaagacacaattctacccactagagaccgtttcccaaatgcctattggctgggagcgtgtaaacactagcagaaccacctgtgagggtggaaacgctgcatataattacggagttgaaagcgaaagtttggaggcaggcggggaggtaggggtggtcttgagaaagaggaaaacatcttagagcatctctacttggccaggattataggaagaagagaaatgcctccccgggacaggcatctgtgggatgtcccgccgaaatgctgccggtctgtcaatactcagctctgggcatcacagagccatgaatgggtaagcttcctcccaagaggagcaggatgtgaaagaagagggggccctggggcagctggaaccaagaacctatggaagcacagagctgggcaccagattgcagtgggtcaaggaatgaaggtcaggtgagaaagtgacgtgcaaggacctctcgccagcagcttgccttgggaagggctggagggagggtgccagctagagacacatggagcaaaaaggaaatacccttgagtacactgctgataatgaaaagcccttaatgagacagagccgaggagaggagggtttgaagattcagaggagggagaggatgggggctgaagagcatctcttggcggggagatgggggtgccaccaagacaggctgaaagtgctccccctttttgaaaggagcaggagacagaatgggtgggttggcaagtctggggataaagcgggtaggtgacaggctccaatccagagcagctgaagcgaggagggagaagggggccaggaggcagagaagctggagagctgtgcagaatctcatcaccaggaaccttgaacttgcacctgaaaaatgggcatttcatcctgaaagtactagagaatccttgaatgccactaggcaaagaaagttacacgatttgctttttagaagacttccttggctgaaggatgagggagcccagccaggaggctgctggccaatgtcagaggaaagagtagagacctaaccccacaggtagagctggaagacaagaaagaagtggcatcttgagacatagggttacatctatcttactttctttctttcatttttttttttttttttgctttttagggccacacccacagcacatgcaagttcccaggctaggggttgaatcgaaactgtagctgccagcccacgccacagccacaacaatgccaaagccgcatcttcgacctacactacagctcacggcaacgccagatacttaacccaccgagcaaggctggggatcgaacccgcaacctcaaggttactagtcggattcctgagccacaataggaactaccgggtcacgtctttgaaaatctgcttcagtgttactttagagaaactgtcctggatttaaaattactttccttttgtagttatctatctttcaattttatttcttcttctaccagagtgtcaactctgtgggcagatatttttgtgcgtttggtacctgtgtggaaacatctgtctattacagcccctggtgctccgtacagctttgtaggctaaaatgcatgcctggtacagtgcttggcacctgtgtgttcaataaacatgaactatggtgataacaacagcaagaataacagtgagcaatgggatgaagggagtgaggcagaaatgagactagtttggtgggactcaaagtgtggactgagcaaccggtagcatcagcatcacctgggagcttgttaagaaatgcagagcagcaggcccacagcccaggaacctgtgtctgcatgaggtctgcaggtggtctgggaatggggctggttcccaggtttctggttgaaggaggagagtgggtggcatcgctgctgactgacatggagcggcggggctgagaggagggggagtcagtgagttctgctcaagaggtgctgagtttgaagaacctgcagaagtcaattcagcaatgttgtcccagagagagagcccggggagagcccagtttcggagctgccagcccagcgtgcaggcaggagtcggcaggtcttctgtgtgccaagggaaaggagcacggagagcagaatggggcctccttaatgggcaccgccttgaaatctgaggggcagggccgagaggcaggaggagaaacaagaacaaaagttgttgctgggagaaaccccatctgaattctcagctcagctccacccgtgaccgcctctggccctgcttcccctggaagagggaaggccacggacaattgctcgggcaaggttgctgctgtttgagaatcccaaggagcgggactgtcaggcaaacagaggggtggcaacagagaggggtcccgtttccagctgtacctccaactccggcaactccctgcgtgcctggttgattcccgcccccttcggatgacaaggtggggccggggtctctgaccatgttgcctgccagctctctgggctcacccctcatgtccggccacagactctaggggaagaccccagcagagcataatggcagctgccttcagagcacgtgaggaggctccagaggccagaccaagaggtgagggaagggcacgcagggtaggaagccaggattcccgagccaacaggtgtgctctacctggctcccatcagtacagctgagagtcaaggtctaaagaagcctctctgtccctcagccaaaaagggaggcccaggaaccagcaagggccactctctgcatttatcaggtcctagtctggcgagagggacacgtgctgactgcagaccgcagctactgcagttgtgttcagtgggctggggctggcagagtggggctgcacaggtgtcccccggaggaagtcccagctcctccctgccccatcacctgttgtattttgctttaccaccctcccatttttgccatttgtgcttggccttgtcacagcaacccctcctggtgcaggtagtttcccagggcctctaaaatcaaggtgcttcccctagaacagttctgatttatacttgttatggctcaatgttttagtacctcctttcactttcaaaggtgtgcaggtgtggaggacaaatcatgttgcctgtcaccctacataaaaacggttcaataaaatagagttcgatgaagtccccttcaagacgcctctcggcttggaccctccaggagtcagggcttgtgtttaccaacagccggtgccgtgacctccccctctccagcatccttcctgctactgcctgtggtacaagaggtggtaaaagcctttctgccacccctcccctaacctgtccccttcagtgcctgttgctgggatcatctcagctccccctgcctccctgtgtaggctgggaggaattaaaagtctaagaatttactggaaaatcctaaggttgttttgtcttgggcttttttcccccctcactagatttttttcttgtaacaagttgacgagcataaaagaccttccaagaattaatctctaatcatgagagatttccttcctagtggaaagctaaaaataacaaagacaacaacaacaacaccccaaaacctcttaactgagcccacaatggagatggcttttcctctgcctgttctttgtcttttgccatttttttttttttttttaagggccgcatcagcggcatgtggaggttcccaggctaggggtctaattggagcgacagctgccggtctacaccacagaacagcaacgccagatccgagccacgtctgcgacctataccacagctcacggcaatgccagatccttaaccccctgagccaggccagggctcgaacccgcaacctcatggttcctagtcggatttgttctgctgcgccacgatgggaactcctttgcccgttcttggaaagagccaggccccagttcaaatgccagtggcgccccacccccaccccccactttcttgctgcgaagccctggctcagtcacttcacattccgagcctcagtttactcatctgttaaagagggatgataattccttactccttgaattgttgacaagatgaacagtctgtaaagctcctggtaggtacttgggaaaaaagcaacttgtattattatcgctggtccctaagagacaagcactgtccccacctcatcacagtgacaggaggcagtatgcccagagattagagcttgcacttgagcaagacaggcctgggaactgactaaatgcgtgaccttgggcaagtcactggaccttctaggacttgctttttctcctctgtaaaatgagaataacagtgactcaccatcggtgagatgacgcacatcaagcttggcatgacccctgatgttgcagcaagtgcccaatagatggtagtttctcaattcccaatagtgattattgcagaactctccacctcacaggctctggcaccacctgctctgtatctccagggtccactatgttcccctgtccccaaaacaacagcccttcctgtgcagggggcatttacaaatccacctttccccttccgctggagtctgagctgcagcccgtgagtcaggctgggtctccacgtgcggaggaggaggtggaggaggaggagtctggtaactccccaaggggggctcagctgggactggaagctgggtttgggtgcagccaagaatttcttcagccccttcctgtcccacagggagcctgattcagagttgaagggaattacgtgtttgtttatttattcattaaataaatatttaacaccagggagttcccatcctggctcagcggttagcaaacccaactagcatccatgaagacatggattccatccttggcctcgctcagtggtttaaggatctggcgttcctgtgagctgtggtgtaggttgcagatgcagctcagatcccgagttgctgtagctgtggtataggccagtggctacagctccaataagacccctagcctgggaacctccatatgctgcaggtgtggccttaaaaagacaaaagaagacccctcccccccaaaacttaacaccaatgttgatacctaccacgtgccaggcaccattcaggctgctaggtcaataaggattagcctattctgtgcctttctcacagagctagtgggaagtggagcccttcctggtgggaagctgagcccggacagcaacacttctacatcctgaagccaaggtgagtgtcctgtgacagcaatgagtcagcccctctctgggctccatggacttctggaagactcggagagcaagctcacctgcctccttgcccgtgtggctacaggaacatgtttaccacccagggtcactctctctcaagcatggccccaatcttctgagctgcctcactttccagatgagaaaactgaggcaccaaggcagggaagtaacttatccagggccacttggtgatgaggtgaagaggccagggctagtacccaggtatctggcatctctctaggctgagacgcctattagccacagcaccagaaatcaagagcttagagacggggcgaagggctgcagtcaatggtcttcttctagagttttcttattaatgcccaggaaaacctctgatgggacatagaaatgccactgggaaaaggggagcatcgtgtgtttactggagacaagtgaggcacccaattcaaaaagaagatccctctcaaacataaaatagttcagcaatggagtaaaaaacacctaaatatgtgttccacttacaaagcatcctatgggctgtgatgaagaatgtggtttggaaactccgattccaccccattgcctctgccttcacctcccaccccagtgtttagcaccaggagctcccagcacatatcacctacccttttcctggctgctgtcttcttcaatgagcttctgcttttgattcccctagagaggctggcagtttcgggcacctttttgttcctctgcttagcagttggggcggagaagaagtggctttggggtttttcttctctgggtgtggtttcctagccctcacaaaggaaagcctacagcctgctctgtctgcaccaccagcctggttgcctcagctggcagagctgattagcatgcgaggtgcagaagggaacagcctgcctggggtactcaggatactgttctactaaatgtttcctgctctccaccttcatagtaggatttcatttcctggtccccttgcagttgagtagggccatgtgactagtctgaccaataagatgtgagttggcccaagtatttaattgctggtcaaagaccctccagggctctctttctctgtgccatgaagtatattcaaggacgtaactgctccatcagcctggctccttgaatgaggagcacagcccctagctgacccacggggctcatgttaattagagtaagacataaaccgttatgggtttggccccaaagatttaggggctgtttgttactgtagcataacctacaccatcctgactgatacactgcccatctcacacagagtgagatattccctagttaagtctaccatcttcccaatgttgctctttcagccagaagccatttcacttcctctgagctccccttggcctcctgtcacacttctgttctgcactctgacttctacttttagtcccttatatataattacatacagccaatttcacattgtgagcgcctgaagagcaggaatctgtaccttatattatgatgatgataataataataataataaacagaggcagcaaatgctactatttattgaatgctgggctgggttctaagcacttgacattcattcagttctcactaagctctgagaggtcagtactggaactacccccactttacagatgaggaagcatctcagtttggttcagctgaaattgaacccctaataatatatatatatatatatatatatatatatatatatatgcattttttttttttttggtcttttcctagggccacacccgcagcatatggaggtccccaggctagggatctaatcagaactatagctgctggcctacaccacagccacagcaacaccagatctgcaacctacaccacagctcacggcaactccagatccttaaaccactgaatgaaaccagggatcaaaccggcaacttcatggttcctggtcggatttgttaaccactgagccacgacgggaactcttaatatttttttaataaatatagttcaacttaagtcattccctctataatcctagtcacttatttttcacatttaaaacattcccagaaggggtctataggctcccccagatgccaaaagagtccatggcacaataaaggttaaggtcccctgtagaagcagataccagggttacagtgacagggttctgtcccctgttctcctggaacccagagtttctggctggtggagggtaagggaccctacaccaaattcatgccacagtggggagtgaacaggagctactttattgtattcacatagcataaacataaatatcgtaggtttggcatatggaactccctgtcatgaatattttgatttcagcagtgtcagcccaagtataacattcatcacagtaaagaagtcacttgtttccccagtaaaaaaacaaaacaagggcgttcccttcatggctcagcggttaacaaacctgactaggatccgtgaggatgcaggttcgatccctagccccactcagtgggttaaggaactggcgtgtaggccggcagctgtagctccgattcaacccctagcctgggaacgtccataagtcgcaagagtggccctaaaaggcaaaaaacaaaacaaaacaaaacaattcctaacatccagtgtgctaattagaaaagcatcagctcttgatcacaaattgggataacaggacagcagccatctctggtcagtcccactcccagacgatgcatccttgagggcagatgggccgaccacccacgatgagacttgctttcttagcttctgagcactggcttggtccaagtagcactcacataatctcccatattgtatatgctgaagttttatactttattgaaccagaatttactttaaattccaggcatccaaacatatacactgaatccaggtgaatccaagcagaactctctggatttcagaaatcctgggtgattacaagactcagggataaggtagcagagccaatgctctgtgcctccttgccagctggccagtagtgagggctgagccccaggacaaccgggtggcagtctggcactgccctggtgggctggatgaccttccgcaaattacaggctcagttttcgtatcctccaaatatggagccatactagatccaagtccaggcaagaaacaatcacaaggcacccgcgctacgcctagtactgtggggaaaacagaaattacacaaactccataaggagcttacattctagttggggagccaggcctggaaacaatttaactattgtgcacgacagaaagaagtaagtatgaaggtggtggaagccccctcttgtgctctgggaccacagaggaagcacgaagccaggctgcataggcctgcgcagctcggtttcaaagaggaaggggctatgcttgaactgggcttcagagggtgagtaggagtctgatgggtgaggaagggcatacaggtggaagggcaaggatctgcaaactcggggtctggaatgggaagccccacccccagcccagatcccagcccaggggttccagtcctgctctctccacacatccgctgctttggaatctggaagagtcctggaaacctgtattttgaacaagctcccacagtcattctcacaagcaggcagtgagtgttatagattgagaaaaatgaatgaacaaatgaatgaatgaatacaaaaatgaacctgagaagttcctgttgtggctcagcagaaacgaatccgactagcatccacaaggacgcaggttcaatccctggacttgctcagtgggttaaggatctggcattgctgtgagctgtggtataggctgcaggctcagcttggatcccacgttgctgtggctgtggtggaggctttcagctgtatctctgactcaacccctagcctgggaacttccatatgctgagggtgcagccctaaaaagacaaaaaaaaaaaaaaaaaaaagaacttgacttccggtaagtccctttctctcttaggatgtccacactacattaaggagctaaagagcttcagttgtggctcagcagtatccatgaggatgcaggttcgattctgggcctcgcccagtgggttaaaggatccagtgttgctgtgagctgcagtgtaggtcacagacaaggctcagatcctgtgctgctgtggctgcagctccgatttgactcctagcctgggaacttccataggccacacctgcggcccttaaaaaagacaaaaatgaaaaaataaaaagcaaaataaaagtgctgaattggcctggtggctttcaaactgtgttccagaaaaaccccagaatctccctgaagtccctcagggacacagaggaactggggaggctgagagagccggactctgggccccatccacccttctcagattacctctccttttatctctttgctcttttttttgcaataaagggttcttggctacaaagaactcttaaagccactgaattgaataatcctagaattcccaaggagtcagagttcccattgtggctcagtggttaacaaatctgactagcatccgtgaggacgcgggtttgatccctggcctcactcagtaggttaaggatctggcgttgccgtgagctgtggtgtaggtcgcagacgcggctccgatgctgtggctgtggccagcagctacagctcctattcaacccctagcctgggaacctccatataccaccagtgcggccctagaagacaaaaaaaaaagaatccccaaggagaaatttaaaaatttcttgagggcagcagcttacctttggcaagtatgaagagagcataagggtctttttcagaagcaagttatttaatcatcacattttaaaaaccttttgctgtggcccagaaattagtgagtgaaggaaaaaagcaatgtggtataataatgcaagggaatattatgcaacctttaaagaacacttttgaggaatggttaatacaatggaaaataaagtgaggaagtcagatacaaaatttcatacagactgtgatttacggtatggattttttttttttttttttttggctacacacatgaaagttcccaggccaggaattgaacctgccacagcagtgacctgagccacagcactgacaactctggatccttaaccccctgcaccagcgctatggatcttatacatcaaaattattggacatggatgttagtaggccggtagctgcagctccgatttggacccctagcctgggaacctccatatgcctcggatgcagccctaaaaaacaaaacaaaacaaaacaaaaaaaagaagaatgcaattctgacatgtttcagcacagataaaggttgaaaacattacgctaagtgaaataagccagacacaaaaggacaaatagtgtgtgattttactgagatcaagcacccagagttgtcacattcaccgagacagaaagtagaagagcggttacgggggtgggggggatgggggtgggcagtgggaaattactgcttaagcagcacagagcttctgtctgggatgatggaaaaattcagatggttgacactggggatggctgcccaacgtgtgaatgtgcttagtggtaccgaactatgccctcaaaaagcattagaatggtttatgctatgtatcttttaccacaataaaaggggaaaaaaaagccagaactaggtgcataggttatagtggtgaatactatgcgacaagcttgtgggcagcgtggtcactttattctttgcatttctctgcatttttcaaacgtcctatgatgagcatacatttctttttaaaaccagacagaagagcgagttaattaaacaaatctcgtggttctctgacacttttgcccaaatgcgttactgtcttttgcgtaaatgtaaggtgtgttccctgtccttcgttaataaaaggagccgagcccaaggatgccaacgaaaggatacaccgaggtgctcaagtcaacgacaggcacagcggccctcctttctaagactcgttgctctcgtctatatttaataagttccaaataaaaacagaacccaaacaaatcctctaatgaacttcctaagaagctgtctggcttggaaaagctcaaaggcgaactgaagagaaagggggaacagctgctgtgtttttagggcattaactcactgcagctgggacagtgcctttgtcagtagatttctatcccttcttgcttctgggaaatgttcttgggcagaatgaattcagaaaccaggagaggctccccagtggtattccctgccaatccatctgctccagtaccctctccccaccccagaaacatgctgaacaaagatttaaagactcttggtgtgaagggcagccacgtgtctgcctgccagggtgccctccaccccaggccgcctgggtccacttgcccggctcctgggccctctgctcaggggtggcacaagggcagaaggtagctgccacgataagcagaccggggctacccctggagtggcccctccctggctacgtgacctctgcctttttcaaatgttctatgatgagcatacgtttctttttaaaaccagacagaagagcgagtaattaannnnnnnnnnnnnnnnnnnnnnnnnnnnnnnnnnnnnnnnnnnnnnnnnnnnnnnnnnnnnnnnnnnnnnnnnnnnnnnnnnnnnnnnnnnnnnnnnnnncgtatatggaccataccaccttcccctggccccaggttctcacctatgtgactgagggaggtggactggggcacctcttagatctctgccagctcacacatcctatgattgcatcatctcaaaaagaaaaagaaaaaccaacaatacctaaaccaaactaaaccctaaaaccaaaaccaaaagcagggtgccttctaggaatctaggccaggttcttacgtttgggggggccttggggtccctatctacaaaatgaggcacggagtttccaccatggcacagtgaaaatgaatttgactagtaaccacgaggacgcaagttcaatccatggcctcgctcagtgggttaaggatctggggttgctgtaagctgtggtgtaggtcgaagacgaggctcggatctggcgttgctgtggctgtggtgtaggccagtgcctagagctccaattggacccctagcctgggaatttccacatgccacgggtgtggcactaaaaagaccaaaaaaaaaaaaaagggaaaagaaaaaatttggcacaaccttccagctcgttccatgtccaacatctgtaattcctgaaaggaaggccccatcctccccttgccctccaccacgtcctctacctcaggccaggctcacaaacaggaaatatgacattcgagagcagcagaagcactgcttgcttctcgacagcataggggccgatggagaacaaagagtttctgagcttttccagcaacaaccagggctccatgcccaagaccttccccaagcagtgcaggcagaggacactgctgggatgggctggcctcccatgccatccccgccccggtgtgttcccaggggcccccggcagcgcagaatcagcagataagctgtctggccgtaattacacgctgatgcttgaccaaaggtggtaaaaccctaaacaggcggaaggcagggtgcaggattcctggactccagtgcaggagtggagtgaccctagagaggccctacccctctctgggcctgagtttccccatctatttttttttttttttttttttttttgtgtgagtgcgtgtgtgtgtgtgtgtatgtccccctctatttgaatgaaagggctagaatggggcctaatggcagctctttgcttgctccgaggtcttcggtttttcttttttcattccatttttttttttttttttatggccacacccacggcatatggaagttcccaggctaggggttgaattggagctacagctgccggcctacaccacagccacagcaacaccagaccccagctgccagatccctgaccatagcggatccttaaccttacaccacagcggattcttaacccactgagtgaggccagggatcaaacccgcaccctcatggatcctagtcgggtttgttacagctgagccacgacgggaacgcctgatgtcttctttctgaaggcagtgtgtggccttgatgaaaggccccatcatcttgcctgtgtctgcgtcccaaatctctccctcaccacgtgaccctgagaaactgctaaatctttctgtgtttcgtttgctcatttgtaaaactggggttgctgggtgatgaaaaggcagagctcctgtaaagctcctaggacagcttctggagttagcgcccaggaagcgtgcgctcttgctgttttatgatttctctggtttcagaatcgctccccttgccctgtttgccatctgaagaaggagcaagcatggcccagagagccatactggccctgcagtccacgtctagccctctccctccaagaaagcacatgtgaatcttggtcagccaagcacagtgggaagagggaactatgggagaaaaggcagaaaatcctacgatgctgccccacagcagatgggctcgggtgtcagctgctcccaggggttgctgggcactagagaaggcctccagctgcacccagagtcagtagcggagggagggtcctgggctcatctccagcttgatccccgaatggggaggagaatgaccccgtgggaaggagggtgatgagatgcagaagatgcagccgggtttatctctgttcctactttgccgggaccattcagggaagaggaggccacattcagtcatctcagccccgaggggaacagggaacagagaggggtgaggatgacagcactggtggtctctcccctggggacatggaggtgtggcctccctctgccacagggagggtcccaaacctgcctgtcctcagtgttctcacctgccaagggaggagacgcaaatgcctgtttccaccaggcgctctagggtctcaaattgtggctgcggacggatgcatcgaggaggcacagaaattgagagtgttttactaaaggaccagtccacaggggattagaaataaaggaagaaaggcctgatcttctaccacactgtcctaggacataaagcatgatgcgggagacaggcaggacccctgttccgcctcctggggctaccccgcttggctccagtgagctctgtggtccaggtggaattgtgggctcccatctggctgggacgactcacccagacagactgccctcctgatccgagagcatttcactcggcagcaaattcaacccacctcaaaatatcagctgcccctgatcaggcagggcctggctccctctctgccaagccccacagggctgggctgggatcagtcatggcagctcaagggaagtcacgctgcacccagaggtaaaagctgtcctggcagagaaagagaaaactgatggtcctaagaacaagcacactggctttcacccttgaggacgctcagttgagaatctcggtttgggagttcccatcgtggttgtagatggctctggtgtaggccagtggctacagctccaattagacccctagccagggaacctccatatgccgtgagtgcggccctaaaaagacaacaaaaagaatctctgtttggctgccctgtgtggcaggtatgcatttatcaggtatagagacattttacagatgaagggagcccaggggatctttgctcaaactcttttttttttttagctttttagggccacacccgtggcatatggaggttccaaggctaggagtcgaatcagagttttagctgctgccctatgccacagccacagcaatgctaaatccgagccacatctgagacctacaccacagctcacgccaaagctggatccttaacccactgggcgatgccagggatcaaacctgcaacctcagggttcctagtgagattcatctccactgagccacgatgggaactcccaaactcttttcttttacagataaagaggctcaaggaaaggagcaccttgtcgcagaagcaggatttgaaccctccaaggctcctagccccatctgcattcagcctgccaatccacggttaggagggccaactgcacacatgcgcagtgtgggatgtggtgaggaaccacacaggaaaagccctcagttctcacagagctcacattctaaacaaacaacaaaatcagtcattataattaacaaatcattaaagacataatttcaggtgggggagagggttataaagcaaatttaaaacctggcgtgtttgagagtgttttggggtgggggcagctgctgtttgggaatggcctctttgcactggatcctctcaggtcctcccaagccagtagaatgctggagctggctcctgctggcttgcaagggccacgtctcattaggaatttggcgagcaagttgttcaccacagccattattaaaaattaaattacataaacttagaactaaatgaattatagtacgacggaaggtaatcatcaaaagtcatcactccctcgggttcccaggtggcctagcagttaagggtttggtttgtccctgctgtggctcaggttcgatcccagacctgggaactttccaaggccacaggcacgtgaccaaaaagaaaaagaaaaaaaaacttcattaatttcctctttgtatgaccacatactatactcttgaagttgtttatatctattgaatctagacgtaatagatactcccagttcctccagtagtagctagaaactggtcatggtagaaatatgtctactatggaaactggcaaataccctctacgagggctttcacttttcaaagagctggtggtgaaatatttaccagcacagccttcagctctaatccaggccttctatgcctgtgggagtctgggttcttccaaggagagggtgtggtggtatagtctaactctcctggggctgggggcgaggggaggtggtgggcagtgcctccagccctgtcctcttcttcttctgtgtgtgtgtgtgtgtgtgtgtgtgtgtgtgtgtgtgtgtgtgtgtgtgtgtgtgtgtgtgcttttcagggctactccctggaaagttctcaggctacatgttaaatcgtagctgcagctgccggcctataccacagctcatgacaacactggatccttaacccactgagtgaggccaggggtcaaacctgagtcctcatggatactagtcgggttccttactgctaagccataatgggaactcgggcagtcagattcttaacccactgcaccacagcagggaccttcttcaaaagtgtttttcaacagggatctgtaagagggtgattcattccttcctttgttatttatttttgataaatgaaatcctatcataagcataccaatataaatttaaaggaaccctgccgagaatctctttgtataaatgcctgcagtcacttctgagttcccctagattttcataggtggagggacttccttagagaatataactgttctcattaacagcagactgaagttactattacctctactaataacaatgacaactgtagctgtcttttactggcaccacctcaggcactaggcacatatattatctctaaagtctacatcaacccattttacacataagaacgttgaggttcaagggttcaataacttgacctgaggccagcctgctgctctgaaagtttcacagaaggctttttccttctgtagcgacagccctgcgactctccttagacctgcaggattctgtggtcctacaggaccccccatctctggtggtttgggagaatttcgtcacgtctcagcttagtgtaaggaactcccttccatcagcagaacagaatgagccagacgctccccctggactttcttttttttttttttttttttgtctttttgctacgtctttgggtcgctcccgaggcatatggaggttcccaggctaggggtccaattggagctgtagccactggcctacgccagagccatagcaacgcaggatccgagccacgtctgcgacctacaccacagctcacggcaatgccagatccttaacccactgagcaaagccagggattgaacccgcaacctcatggttcctagttggattcgttatccgctgagccacgatgggaactcctccccctggactttcacctgcaatgcaggaaagtgacccaggcctggtcacttagcagcttcccacccaaaagaagtagcactcaggttctgataccagtgaaatgttaacagcggctccagtgccagcaagagctagaattaactcctgttgggagaccctaactgtgttaggtctgttgcctgacctctcctggttctgagcagcttggttttcaagctcccccaggaataccatgagcaacaaccaaaaaatccttccaaggcacatacctcttctgcctcggtgagctagaatctccatcggttgcttgtaaccacaatttctgacccgtacctcatctcaagcgcttctcaatatatcagccgcaaacattcgctgagcctttcatgccagagaaggagctcctaagcactcaattagtttgcacagaggaatagtaatcgtgcctttctgtgcacagctctggcataacctatgaaaacggagtttgccacacaaaatagcaatctgcaaacaaccacagctcaactgagagcaaatccaggcccagtccctgctccccgggagccatattccccctaaagaaaaccccttccttgattttgtcaacggtcttgtctttccccacagatgccaggcaagttcctcttggggacagctggccggccacttgaggacttgcgatttccctgacgtaggagaaaggacagctgggtttctgcacacagatgctgccaagcccaacgtcacccttctgggcagctgacccattgccccgggcttgctccctcccctgtgcccctccagacaccagggccatctggattctggaacagccatggggaagatcaggatgactggttctcaggacccctttcctttgcctgaaacgctcttcctttttcaccctctacatcctgcgggcctcagtttaaagatcacttcctcagggaagccctccctgaccacttccccagacaagttcagggccccaggaccctgccctgtttatctcctccatgtctctgtctgtgcagttcattgtttactgactatctccccagctgaattctagcctctgcacaggaagggattgcacctctgttcaccgaatctcaggttatctagcacagcatgtagttccataaatcctgaacgctttaaagatgagtgaaggacattctggcggctcagtgagcgctgaatgagtatctgatttaaagcatgcatctcagcaacaggtgcatcttttaggaccaccgttttctggtgcccaaactcacaagggcagggtgaaaatttagccatccctacttctccccgggtcgtttttagtttgaaggtttgtttcctgtgggttgggactggcccgatttttgtttaacagcagctattgctcagagaggagtttgctagatgccagccttataccacctggttgatggggaaactgaggcccctaccactggctgcaccagcaccggcggggcgagaccagctctctttcagcccagagctcatttcagggtccttcgccccacatggggccaagtccagggcatgcgaagcaaggctcgggaagataagggcacccagacggggatggagtttgaaacttttattaagaacgaatcaagagggaattcccttcatggctcagtggttaacgaacccgactaggatccataaggacaagggtttgatccctggcctcgctcagtgggttaaggatccagcattgccgtgtaggtcacagaggcggctcccatctgtgttgctgtggtgttgctgtggctgagatgtagtctgacagctacagctccgattcgacccctacccggggaacttccacatgccatgggtgcagccctaaaaagcagaagaaaaaaagaagaagaaatcaagagacctggcctctctctctgcccagcctcttccagctgctaccttccactctctccggctagtttcaggttgagcaaggccaggcaggagccctctcgggggctgagcatggatctgggccccagcagcgcccccaaccttcagattcaccttcactctccttgctcagggcccaccagggtctccaagccaaactatgtttgaagtcaagaccaggctttcatgctttggttctgccacttcactcttgagagatggtggccaaacaattaaaacgctgagcctcaatttccctgcctgtaaagtgaggaggcggggggataattcctgctttgctgacttcatagggcttttgtgaggctcaggcgaggtagatatatgtactcactcgtctaactgtccactagcttagagaactctaacaacaactctaggagttctggcagtgggttgagaatccgactgcagctgctcaggtcactacagtggcacgagttcgatccctggccctgtgcagtgggctaaagatctagatagagttgcggcagtgatggcataggttgcagctgtggcttggattcaatccctggcccgagaacttccatatgacgtggtgcagccgtaagggaaaaaaaaaaaaaaaaaaaagatactgtttttctggtcccattagggtcttgcgatcaacgtgtagccagcccatgtcctccagggcccaatcctccacccaacctctcagccaggctctcctcttgaccacatccttctagaaatcctttctgcctctgccttcctggatgtgctccctctgggctctcctccatctcaggtcactcattctcccagttaggacctggcccacctggcagctccgtgctttttcctgccattcacgtcagccaaccacacagggcctgggacaggaactgcagggaacacataccaacactcagatccctggataaggcttgcgtgcgcattccctggggcacaaaacatgcgcacaaagcattgtgtccccaccccactgccctcaccacccctcctttgctggggcatagggcagaacccacagcagacggaaattcccaggctaggggtctaattggagctacaactgccggcctacatcacagccacagcaacgccagatccaagccacatccacgaagtacagcacagctcacagcaacgccggatccttaacccactgcgcgaggccagggattgaaccagcaacctcatggatacttgtcagattcatttccactgtaccccgacaggaactccaccactcctcctttaagagactctatttggcaataaagccagagccaaggctctggcaagagttgcagccaggtctgatcataggcagccaaggtctgtggccctccaagccgggctgggacaagccaagcagatcagctcctcggctggagatttcaatgacatatttttaggtcagcctctctttagaattgcaaggacttttataaataattctgggttaagtatattccacatgatgacccttctgccttcagtccacagtccaaatctacatcactctctggtgtcccagactgacccacctggcttccctctctcaagactaaggctgaagcttttatcagcagaccttgcagcccagggcagggggttgggcaggggggaaacgactttgccccagttgcccttgggaggccacttacccacaagtgtgggttaagtaaagggcactgcggtcacatgcccagtgtgccatctggcttcagcagccaccgtcaaagagggaagaaaaagtgacatgcaacagaatgtaaccggggcatggcctgcaggatgcccagggacctggggggcagaggggtgccaaattcatggggggcttctcagagagggtggtgattaagatgggccttgaaggatgtgtaggagtctgtgggagggtttggggaggaggtgggagggtgtcctgggcatggggaaaagtccagagccatcgaaccaggagagggtttcaggaattgcagcagttccctcaggctggagcagaagttccaaaggatggagtggtgagggtggtgagggcttcagagggctgtctgtatgggaccttggaggtcacccaaaggaatgtgtgctttatcctgagagcagagggagccttggaaaagatggaaaactccaatcaattaggtgtttggaaatgagacttaggctgcagggagagggtgtataggaacaaagaacagggagcatgcagcagcaggggctgggctgaagagggctgcccaccagcacagcaggggcaggggggctggaaggaaagggtctctttttttttagggccacacctgcggcatatggaggttcccaggctaggggtcgacttggagctgtagccactagtctacaccacagccatagcaatgccagatccttaaccccctgagcaaggccagggatcgaactcatgtcctcatggatgttaattgggtttgttaactgctgagccatgacaggaactcctaaagggacactttggagagctggtaaaggggtgggattgactgaactagattagactggaggggaatgtttgttatgcagcataactgcagccaaagctaacagaggggccacatgagcaaatatatagagacagaaaggccactgccatgcttgaagaagcggaacgatggtgctgatggtaccaaagagcaggctgtgtgatgggcattagtttggagagagaaagataggtggggacctgcacgagggagtttctaacaaatatatgaagttgattggattgttgttcccaagtatctattctgggccaataggcagagcttatcgcagtcccattgactttagactcagtcacatgaccagctttgaccaatggaatatggatagaagtgaccatgtgccaattcagagatttaattttttttttttttttttttgtcttttgtcttttgttgttgttgttgttgctatttcttgggctgctcccgcggcatatggaggttcccaggctaggggttgaatcggagctgtagccaccggcctacgccagacccacagcaacgcgggatccgagccgcgtctgcaacctacatacaccacagctcacggcaacgctggatcgttaacccactgagcaagggcagggaccgaacccgcaacctcatggttcctagtcagattcgttaaccactgcgccacgacgggaattccttattttttttatttttttgtctttttgtctttttagggtctcacccacggcatatggaggttcccaggctaggggtccaatcagaactgcagccgccagcctatactagaggcacagtggatccaagctgcatctgtgacactggatcgtcaacccactgagcaaggccagggatcgaacctgcaaactcatagttcctgatcagactcgtttccactgtgccacaacaggaactccctcagagattttatgttatttatttatttatttatttggtcatgtagcagtttgatgtgggatctcagttgccagaacagggattgaacctgggctgcatcagtgaaagcaccccaagtcccaaccactagactaccagggaactctcagaaactttaagaagcattgaattatctctttcttcctccagctctcagcatcaaaatgacacattctaggtagaaggagcagcttcagcctgggtcctgggaggagaagatacatgctgcagatattctatcctgctgccacctggagcagatctacaaaaccatgcagttgcaactgccttctggctgacaagcagtgtgagcaataaataaacctttgtggtcgtaaactaagatgggggggatgtttgttatgcagcataagctaactgatacacactatatatgtgagatgataaggatgcagatggtgaagaacatcacatgtcacgattagttgttgtacacatggtgagtcaacaaagaattttgtaattgatgaaccttctccacctttcctttaaagccaaccctctccactcccttctgctcctcctagccccttgctctatcagccaccccttccctcgcatggactgaatccttcccctgaaactatatctcacttgtctcttccatcctaaaatccttttctttactctgtcttcctccaactctagctcagtctcttcctcgaccatctcaaacaaacttcttcttcttcttttttttttttttttgtctttttagggccacacttatggcatatagaggttcccagtgtgtgacctacaccacagctcatggcaacgccggatgcttaagccactgagcaagaccagggatccaacccatgtcctcatggatgctagttgggtttgttaaccactgagccacaatgggaacttcttcaaacaaacttcttaaacgagttgattctcctcattatctccacttctttctccctcacctccaagcaatctagtttaccttccctccaccccaccaaaaccattcccagtatatttcagcaatctaatagtccagtgcaatccagtccttatcttcctagactgttccacatcatttagcttggaactaaattcattttctccctgcccaacctcaaatattcttctttccatggagttcctgtcatggcttggtggtaacaaacacgactagtattcttaaggactccggttccatccctggcctcgatcagtgggttaaggatccggcattgctgtgagctgtggtgtaggttacagactcggctcagatccctcgttgctgtggctctggtgtaggctggcagctgcagctccagtaagacccccagcctgggaacgtccatatgccacagttgcggccctaaaaagaaaaagaaaaaaaaaattcctctttccatattctctcagctagtggcaccatcattcatccagtgactcatgacagaaagccagcatgacacagtgaattctgctctgtagttgtccagtctgcggtgcctttgagacatccaagaggagatgtcccaagggcagcagctaaacatgtgaattgggggctgacaacagagatctgaagtggagataccgatgactgttagaggcagcatttaaagccatgtgcatgcgtcaacttgtctatttataaagtacaaggacctggtgatacatagagcgctctcctgagcctatacattccccctcctaagaccacaattccaggtaccacttagttccttccttcccaagtcacggctcacaggggcctccatatcaccaccttatttcatattctccccccccaacatgttgccttctccaacaactcttaaaattcataaaaacagaagatataagataccactacccaggcactaaaatgcctaaaaaacaaaacaaaacgcaccaatgtgctatcactcacatgtggaatcttttttttttttttggctttatttagggctgcacccaggcggcatatggaggaggttcccaggttaggggtctaatcagagctgcagctgccggcctacaccacggccacagcatcatcagatctgagccgcatctgtgacctaccccacagctcacggcaacgccagatccttaacccactgagcgaggccagggatcgaacccgcatcctcatggatcctagtcggattcctttccactgcgccatgacgggaacccccgcatgtggaatctttaaaaaaaaggacacaatgaacttctttacagaacagaaactgactcacagactttgaaaaactttcagtttccaagggagacaggttgggggtggcggggtgggtgagggtttgggatagagatactataaaattgggttgtgatgattgttgtacaaatataaatgtaataaaattcattgagttaaaaaaaaatgaacaggagttcccttcatggctcagtgattaacaaacacgactaggatctatgaggatgcaggttcaatccctggccttgctcagtgtattaaggatctggcgctgtggtgtaggtcgcacacagaactcggatcctgcgtggctgtggctgtggcgcaggctggcagctgtagctctgactggacccctagcctgggaacctctacatgccgtgggtgaggcaaaaaattaaaaaaaaaaaagaattaattataaaataaataaataaatgaacaaatgtagatgttaaacacttatcatggaacactcctggaaataaaagaagattagaactaaaaaaaaaaaatggacaatacgcaaacactgtcgaggatgtggaataatcgtgttttatacattgctggggaatctaaaacggtacaccctatgacccaacaatttcaatcctaggtgataacaaaggtccacaaaagacttctacaagaaataatagcccaacttagaaataacccaaaggttcatcgagacgagaataaatatgcaaatgatggtatagccttagaatagaatactactcagcactaaaaagaaagacacagatgaatttcacaacatacacaacaacacaggtgagcttcacaaactatatatatattacatggagggaaataagccagatacacaagagaaatacagtgtgattccatttatgtgaagtccaagagcaggcaaaattaatcaatgttgaataaagtgagaaaatggttgcttggaagaggcgaaggaaaattgataggaaatgggaactttcctaggatgacgcaaagatttcatatcttatttcgggtggccacttcaaaggtgcaaacaacagctaaaacttgtggaacccaaccctcaccacctgcgtattttattgtttggaaattatacttcagttaaaacattaggaaaagaaaataattttgtgaagtatcaataaaataacgaaaatgaagagactctaaagggcaaaaacacattcagttcaaatatataaattatatttgtgctatgtatgcatctatacgaatgtccagccccccttaatgtagccccctttcagccattctccgctcacccttgcccccatcctgatggcctctgtccatagccattttctagctgtcatcagaaatgatgcagtgaaagagcaaaagccttagagccagatagagctgcatttaaattccagctgctgagcacccataatcgagttactcggcctctctgaacgttcatttcctcaactacaaaatgggttgatgagacacaatcaaccctgttgggctggactaagagagaggcagtgtgctgattagtttctgggaaacctaattcttttgacctcagcctgtgaaaccaacttggttgtgcaaggcccactgccggcctggaaaagcccagaggatgagactcacgggctacttctccctgaaggatagggaggtggtcctgggaacccagagtctttgtgggctggtgctaagagtcgagtcgctaactcagagccatcagggccaggaaaacctatgacctatgacaaaggagacaagtttcctgccaagggttggccacctcaggatcttgcccaaatcactttgcacacccctagattccatttatccaccaaaaatggccagaggagcctggatctgaagaatttgatactaaaaacagcttctggaattcccatagtggctcagcagaaacgaatccgactaggaaccatgaggttgggggttcgacccctgacctcgctcagtgggctaaggatccagtgtggctgtgagctgtggtgtaggtcgcagatgcagtttggatctggcgttgctgtggctgtggtgtaggccagaggctacagctccgattagacccctagcctgggaacctccatatgcctcgtgtgtggccctaaaaagtcaagagttaaaaaaaaaaaaagagttaaaaacagctactatgtcttgggagcattgcgatgcaagtttgttctcagccaggcacagggttaagggtctggcattgccacagctgcggcttcggtggcaactacagctcggatctgatccctggcctgctccatgtgctgcggagtggtcaaaaaaaaaaaaaaaaaaaaaaaaaaaacccaaacaaatagcctctggtgtttcccaatctatagaagagatcaaggcaggaccaaactggttctgtccgaaagaaggaacggaagagtcagagtcggagccctgccggctagctcccctcctccaccttggcgtttcctgagccaggatcctaggtctcccaggggcaaagtttgaaatctccctgaccaggtaaaccctagggcctcttttagctcagtcttatccagtcgtggtgcatctgtcaagtgtaataataaagaggatctgcacctgcccccccaccccatctggtaggggaggcaaggtgcacccagaaataactccgagcaaggtacaaagtgcttagtgtagccaaagaagcacataagtccaataaagcatccacattccccccccaccacacacacacacacacaacctcttcgcacttggcatttccttacttccagcagtctctctatttcaggtttgtggaaacgggttctccctggaaaagggtttcccagctaggaggcggcccggccccgactccccctctcccccaccacccccggtccccgcacgtccagcgctccgagacccacccatttccaagcacaagaacaaggcgacaaggcccgctcaggggccaagaggagggcaaacgacgacaagcaaagccacaaaagcaaccgtccgggtctcttgtctttcctggggggaggagcggcgcccgcagacggtctccgcgcctccctccctcccgggccagcgggaagataggggaatctcaagtcgctctgctttctctcttcgcgcactgacattttcccccactttactgtttcttggacgcctttcaagagtttgtgcaaccagtctgtttagctgcttttctgccattttcaaacgcggggtggtgtccctttcgagtgggaacgtggtggcttaaagtctggaagggaccccttcgcctcccgtcaccccgctgcagcgggcctcttcgccgccaaagtttcggcgttccaaagtttcccccggccgggtttcgggctcggtcctccgctctctgagctccccgacttctccctctctgtgcgctcaggggtttctgtgcccctcacttcactctcaggttccctcttgcggaggcatcctcttcccacctagtcccgggcgagggaggcctccgcctcccctgccccacattgggagacagacccctccctcctttcgagacttcccgggcagtcctcctcctctgcgcgccccgagcctcccctctcccgcctccatccggcggaccccgtggaagcccgcagcccctcaggcccgacaagatggggacagagacggggtcagagttgagcacagaggtaacgacgagaacaaaagcggggacacggcagggcagcaacagggcagggccggcgcggtggcctgtcctctccccgcgctgcctccacggcgcccgcagccccgggccgggcgggactcgcggcctccaggggctcgggcagcgcccagcgggacccacctgatcggcagaagctgggtgcgctcggggatggcccacacctcggctcccggccccccggcggcgtcctcggctgagggaacagtggcgcgcggcgtgctcctgagctcggcagggcgtgccggggcggggtgtgccgcctgcgctccggcccgccggccgctgtgtgctcctccggggtggcgggcaggggcgcgaggaagccggcgggcactgggcggcgggcggcgagctccccgctccacccggcccgcggctgtttgtgcagagcgggtcccgccccagacacggccgctaggaggccgagggcgcgagtgcgcgagtgccggtgcgcgtgtgtgtctggtggccgggaggcgcagggggtgtttgtttcattttcactcaggcagaaaaaagcctgaaaccagcaaaaaaagaaaagaaattccctggtgagggtggctgggcctctttgccttctccggcctgcacgtggtgggggtggagggacccggagggtggggtggggtctatcacccagtactgcagggaggggccccggag

SEQ ID NO: 12 - DNA, 1116 bp, Sus scrofa
atgaatgtcaaaggaagagtggttctgtcaatgctgcttgtctcaactgtaatggttgtgttttgggaatacatcaacagcccagaaggttctttgttctggatataccagtcaaaaaacccagaagttggcagcagtgctcagaggggctggtggtttccgagctggtttaacaatgggactcacagttaccacgaagaagaagacgctataggcaacgaaaaggaacaaagaaaagaagacaacagaggagagcttccgctagtggactggtttaatcctgagaaacgcccagaggtcgtgaccataaccagatggaaggctccagtggtatgggaaggcacttacaacagagccgtcttagataattattatgccaaacagaaaattaccgtgggcttgacggtttttgctgtcggaagatacattgagcattacttggaggagttcttaatatctgcaaatacatacttcatggttggccacaaagtcatcttttacatcatggtggatgatatctccaggatgcctttgatagagctgggtcctctgcgttcctttaaagtgtttgagatcaagtccgagaagaggtggcaagacatcagcatgatgcgcatgaagaccatcggggagcacatcctggcccacatccagcacgaggtggacttcctcttctgcatggacgtggatcaggtcttccaaaacaactttggggtggagaccctgggccagtcggtggctcagctacaggcctggtggtacaaggcacatcctgacgagttcacctacgagaggcggaaggagtccgcagcctacattccgtttggccagggggatttttattaccacgcagccatttttgggggaacacccactcaggttctaaacatcactcaggagtgcttcaagggaatcctccaggacaaggaaaatgacatagaagccgagtggcatgatgaaagccatctaaacaagtatttccttctcaacaaacccactaaaatcttatccccagaatactgctgggattatcatataggcatgtctgtggatattaggattgtcaagatagcttggcagaaaaaagagtataatttggttagaaataacatctga

SEQ ID NO: 13 - protein, 371 aa, Sus scrofa
MNVKGRVVLSMLLVSTVMVVFWEYINSPEGSLFWIYQSKNPEVGSSAQRGWWFPSWFNNGTHSYHEEEDAIGNEKEQRKEDNRGELPLVDWFNPEKRPEVVTITRWKAPVVWEGTYNRAVLDNYYAKQKITVGLTVFAVGRYIEHYLEEFLISANTYFMVGHKVIFYIMVDDISRMPLIELGPLRSFKVFEIKSEKRWQDISMMRMKTIGEHILAHIQHEVDFLFCMDVDQVFQNNFGVETLGQSVAQLQAWWYKAHPDEFTYERRKESAAYIPFGQGDFYYHAAIFGGTPTQVLNITQECFKGILQDKENDIEAEWHDESHLNKYFLLNKPTKILSPEYCWDYHIGMSVDIRIVKIAWQKKEYNLVRNNI

SEQ ID NO: 14 - DNA, 38453 bp, Sus scrofa
ctacccagagcacatcaggaaggacttccagtcaggtggtgtgagggggagttttatttgaaaatgattccaaaacctgtaagagataaagtagaaaaacatgttttggaaacttccatgcctgctgtatttgccaaaatctgttcagtacctggtactcagctttccctgaaagatagcgtttctgtactgtttcagatgttcatttaacttagcatttttgatacagaatgcagtccttaaacatgacaattgtgtcttccttctatttttctgtgacatgccttgctttaaggaattcttgtatgtaaaaatatagaatctgtacacaaaaacattaggacctagtattggtgagagggcaagtaaatgggttatatgttatttctgagaaggcgagttggcttcctgaagatcagtctggcagagtatagattattctaagaaatcattatgaatttatcctaagaaatttatcctaagaaatcattatgaaagtgtgcaagacacacctacatatttctttgccaaaacatcatttcaaataatgaaaagttagaaacttacagggtagatcaaagactgttcagtaatcatgcaggtgtacagacgtatgtatagtattatcccattttcattttttgaaaaagtgcttgtggtatatgtgcttgtaaacagaaaaagaaagatgaactagacaccaaagtacaaattgctctctggatggtgggatcatttgtggtttaactgttttttgaatttaaaagtttttttttttccaaattttctgcggtagatctgtgttatttttatgatcagaaaaatatttagtaaactaaatctcattttaaaagcaacaaagatatattgggctatgactgcttcccaagattcatcacaggatcctttcacatttatgaactttgctatcaaaacagtatatagaaaaatagtcttcagaatcaatagcccagaagtttccaagatgtaattttttttaaaagaaaagttatctttgaatctttctcactcaaatttgctccatttccttttttccagaacagaagtcagctacgaactctgttgaaaatgaacaaaatgttttcattttgctttacaaatgaaatggtttccaaatggaatgttttacagacattaaaatagttgaggttggagttcccatcatgactcagtggttaatgaacatgactaggatccatgaggatgtgtgttcgatccctggcctcgttcagtggttaaggatccggtgttgccatgagctgtgcttgtaggtcacagacacggcttggatctgacgttgctatggctatgacgtaggctggtggctacagctctgattagactcctagcttgggaacgtccatatgctgcaggtgtggccctagaaagacaaaaagacaaaaaaaaaaacccaaaaactgaggttgacctgtgtgtcccaacactagaaataccaaagatattaatgaataaaaaatgcaaattacagatgtaccaggattacattaaaaaaaaaaacaaaacaaaacccaggaatgataacctcccctcctcaactataagggatgttttattgagaaaaaatacatttcttgaaatgctgatatgctcaaaaataggcctggggtgatacaactatgctgttaccaagtgttaccctggagagtgggtggagaaaggcaggaaacagggttttgtgggaggtgtggggttatttcctttttattttatataattctacattctttaaatatttttaaagcaatttcaagatattcaaaaagaaatctataaagaagaaatgtcaagacaggcctgtgcgtgcaagctcatggcagaagcggggtaggaggcttgcctgcttcagactaaattcctgaccttttcagagggtcagtggtcatgaaagaatgcattctcccctcttgctgattattttgcaaatacaaaaatggcaaatggggctttccagcatttcagcacaaatattccaactaaagccctaaggacctatacggttttgctatgagaaacttacgtggtttttgaagctcaaccagggagaaacttggaggatcatccccttaaccaactagttcaccaaattcatgctcagagttgggcaacatgggagatgaatgtcttccaggatcacaactttgccatatcaccccatcctcattcttgtcatagtgattcttagtaattttgcagtgtcttcagataaattctgaggagtggagctgctggatccaaacacaccctctccctttcataatgtccttcccttccctgtactctaaactacttgtatacaggattgaagcacatgggcatgaatgtccaaatggtgactctttgaaagttatcttcctaaccagatttgcctttcaaggttaacaaagaaaaaagctctaacggtggaatctccatggccatcaacactgcagggcacagtcagtcactgactctgcttatatagccctggcctcctctgcagcagcctagggcacacacgacaggcattttcggacttacagatgatggtatatatcaggatcccgctgaagccgggtttggaatcctatgtacaagtcatcccagagcagaccattctttaccacgtgtctgatgacatcaacccggctccgaatctgaaacagaggaggaatcacgagttaggcgcaacccagccagtagagagtgtcagtatggacccctcgtgtcccggagagaagcagctgcctgtaagggcagggatggaggaatcaaggagaaaagcctactgaagcagatctcacaggccgagggggagaggggcccctgagtgcagcagaaatcgagggatggaaacaggaagtggatcaggagctgggggtgcagagtggcagagagtacagacagagttggatggctgggtatgaacccccaatatagctgtgtgaccttggcaaccattctgtgcctcaagttcctcatctatacagtggaggtaatagaacattcctcctggggctgttgtgaggattacctgagccagtgtacttaaaatactgaaaacaaggcctgccacagagcaagattaccttaattcggtggtcaaggcccttaccttcaaagaatcccaactcctgacacaggatctgttgaatagtcagaggtgcacagggttaggagacaagcagagatggttttgagtttcagcccagcacttactaatcatgtgaccttaaccttgctaagcctcggtctcctctgtgactgttgtgagaaaaaaaaaaagagataattcataaaaaaaaaaaaaaaaaagagcatgaagtagcatgaagggaagtcactctaagattggactggcttcaacattttatcggtacccatgttcatgtttaccaggagcttttcagtatctggcatcatattttttttttcctgagaagtattgtgctaatgccagtagaggaaactttatcataaatgacaggctattaaatgacatagaatgatcaggagtttggcattagggatttacttctttttcgttcaccattcctataaaacaattacatccactgtgatctgagatcgcaacacaggtcaaaggcactctcattttgccagtagagatttagaaacactgcacagtttgtcaggtcgaggactgcccagctcaggggcagtatcaagatctatttcctcacagtggagggaagatggcctttcttgacctttcaatatagaggagagcacgtggaagaactaggggatgttttgagcaacatttagggtgtaaactgggaagggcttggagactcattaggtttagggatggagaaggaaagattgaagattaagcccttgtttctagcttggctcactgctgggggtaggggaaaggcatggatgttgccaataatcaagatggaaaaggagaaagaacagttgtaagaggattttgaacacgctgaaagtgagataccaaaggacttagacatccagggaatgatatctctggggggattagctctacatctaaagctggacagtgttggagagaggtgggcaaaggccgggcaggacctatggatttttggagtctttagcagagaagtggtgccagcagatgtgttcacccagccacagatttaagaagaagagtgggttgagcacggaaccccgggaaaagaagagatttaggtggtggctggagaaagagatatcttggaaggatgcagaggaagaagagtcaggaagtaaaggagatgaggacttgtctctgggctgagaaaggacttctagttcaaaatgatggaccgctctcgtgcataacccatgcacatcttccagactcaactgaagtgttgacaaaacaactgtactgggctgaactgcctcagagaagaagaaatgaagtgagtcactgacggcagtagatttggactaactaatgtgaatctggaaagctggcaggtaagaggtgtctgaggaacagggcagaggctgcagaatcccagagagtctgtggggggacattcagatgcaggaggaggagaggtaggtatcctggacgacagcagggacacacagcacaaaacgatgccatgaaaccgtggaccccttccctatgcctcagcacggctctgggccaaatgcattcagacagtgcactgaagaaatgggatcaattttgtaggaaaagtgtttgaatgagaccagggagtgtacttgtgatgccccagagcaaggacctccccgtctcagtatttaggggtccctcagcccaatagctgaacgctcaactacacagcttaaactgatgaccccttgtccaaatacaacctagatcttagttcattgcctatagtccctttaaaaaaaaatgaattagctttccacatctataaatctgggtattacatatgaaaaatccagatttctgagttttctagaaaattcagaagtacagctggagctcagtaagggccactcccttcccatctggcatttcctggccacatgacacggtccccacccagctccacccaattatgagatctttctgtggtccgtttatgagcacttgaggatatgacccctgccttcaagtaaagcctgctggataaccactccaaacatatacagaaagccctacctcagcttgaaaaggtctttgttgttgttgttgtagatatagattaatcccttaattcttaaaagtcacctacagtggaagaaagatcagcctgggataagcaacactgcatgcaactagaagccaaaggagcaacgccttcgggtgtccatggaaagtaacagccacccagcatcatgggctcagccaagctatcgtgcaagaccaggcaggaaagtacctccagtttagctcacgtgcaaattttcttcctcagattcttaagcagaaggttccacaaaggaggaaagcgaagaaagtgaagccatggtggggtctggaagtgggtcaaggatgtctctgggtggcagattggcggcagacccagagaggagcccacccaaattggagcaggaggatggagaactccaggagccatgcgtctaaggaagatggagacttgtgtactagaaaatatatttatgagtttgaaaggcaattcacgtccctcctcaaaaagggaatatgagaaggctccaggtagcaagaaaagagctcttccaagtaccggcataacctctttaaacaaacctcaacaactagaaatctcacaaaattcctgggcaataaaagcactgagagtcaaagtaaggaccaccatgtacgtgacaggcatgatgctttgccccagggtgtatcaagtctgcaagagagctgtggcttactttatcctacagatgtattatcaaaagctatggaaaagtgacttactttcaatgaaacattttataggaactcgtggttttaaaaattccaaagattatggttaacagataatttagaagttttataaatttaaatttgaaagtaaaacagtggctaaatacacagactctggagatagactgcgtgtggtcaaacccctgcaccatgatttacttgctataagacctcgggaaagttatttaatctcttggttaaatatggcattttccttatctgtaaatgggaagtacagtaatatctgttcataaggtggctgctgtattaaatgacttaatatttatgaagctgagcttggcaagagcaagttatcatgtatttggtgaacaaaccaagacatttatgattcttttttttttttctttttatttttaacagccgaatctgtggcatattctgggctgtggaagtttctgggctaggagatgaatcggagctgcagtttgtggcaacaccagatccttaacccatcgagtgaggccagggatcaaactcacattctcatagagacaatgtcaggtccttaaccagttgaggcacaacaggaactccttatcagatgcattttgctctaaatgagtgtttcacacagggtgttcctgtgtgtgaaaacccagggattttttttaactcagaaagctggcagtggattattggtttcactgaacttttggcataggcttttcttcaacagcaagtgctaacataccaatgattaaaatgtagtttaggaacacatctattataggaagctacatttacacctctacaattaagtcgccacacattcatgtgacacatgtaatatgcttaaaggtggactatatatcctcctaatttatttagtgattcatttatatagaattaaaaattacaatgtatgctcacatatatcatgtcatttgactgtcataaaaaaaactgataaggtggcaagaagctcaatagaatggaaaaaaacaacctttggacagggattcaaagcctcattattggttatctgaatcagtcggggtgaggcacccttcttggtcttgaccttgtgtccaaagccctagttcttaacatcatgcctctctgccgtaggtgagggatttgctcaaaattggagctcaacaaaatatgtgttggtttatgttgacttaactccctttccagagccacactgggtttgtttggggaaggagacaccactggagagaaggcaaggagggcagagatcagtgcttgcaggtctgagaacagcataagcaggccagctgtttggaaggaagcaggtcaagaagccagtctttgcaaatgactcaaaaagaagcaagtacggagttaatagtaatgtttcagtatcagagtattggttgtaacaaatgtaccccagtaaagtaagatattaacaataatttggagttcccattgtggcaaagcggaaacgaatccaactaggaaccacgaggatgcaggttcaatccctggccttgctcagtgggttaagaatccagctgtgagctttggtgtaggtcacagacgtggcccagatcctgcattgctgtggctatggcacagactggcagctgtagctccagttcaacccctagactgggaacctccatatgccacaggtgtggtcataaaaagcaaaaaaaaatttatatatatatataaacactactgtctgtaatatccttgcaacttttctgtaactctaaagttgttccaaaataaaaaagtttatttaggaaggaaggaagaaaggggcacttccactggtattcctgcttacttcctcatatggatgttcccggcttggtctttcttttggaaaggataaatccagaaagtcaaccaaatagtcatatcctccaggcaaagggctgaagtcctcatctgtctcaatcatctgttcaaatgacaacatggtaaagggaagaagcatatcaatctggcggtcaaggtccttagaaaattctagaatgtgcaagacccaagtgcccttaaatgatagcaatgaagcagaattaatacaaaaactgtctctcctctttgctctctcccactgccccatccctctacccatccctctccctccctccctctcttctttcttgaactgaattcaaatcctagccttctacactagcaaaaccacttcataacactaacttaaataaaatttatagagaaaattatcattatcttagtaatgagatatcaaattggctaaaaaataataaaatgtggactgtttctcatcatcacatagtagctaaatataaaagagtatcattaggagttcccgtcgtggcgcagtggttaacgaatccgactaggaaccatgaggttgcgggttcggtccctgcccttgctcagtgggttaacgatccggcattgccgtgagctgtggtgtaggctgcagatgcggcttggatcccgtgttgctgtggctctggcgtgggccggtggctaaagctccgattcgacccctggcctgggaacctccatatgctgcagaagcggcccaaagaaatagcaaaaagaccaaaaaacaaaaaaaattcttccacctactatccttttattttatgaaaggaaagatgttttcacacctcaaaaatagaaaggacctaatcttggaataatgacaattcgtccaaaggaaagagagttgacatcttggtgaccatactcagatgtgtgctcatacttatttcgttactgaccagcaaaaactttgtcacagactgtcactgacccccaggttgaattttaggattcattgattttgaggatggcaagtgttgcctggtacccagtactaatgttcaggggttgaaatttaaacttggaaatagtctttaccctggaggtaactgatctttgttcctaagggtatgaatactgtgcatttcccgatgctttccctaaactttgctctccaggcacacattcaggcactaaatataagtaggataaaatataagtatggcagggattcccagaccattttaggcctcctctttctcttgcatcccgctgcctgttgctacttattttgcttttgtggacatcctcagtttcagtgaccagcttataagctgaaccacttagctggtgagctctgtgtgtctatgtcagggctaacttaagttctagatctaggcttacttcccagttggtgcaattcagtccttacccagctgcagtccttaccttacctgcttccaggctgctacaggacaccagctctgcagtggagccacctgtctgtcccacaatttatttattttttatttttttatttttttgcctcttaaggccacacctgcagcatatggatgttcccaggctaggggttgaatcggagcttcagctgccagcctacgccacagccacagcaatgcaggatctgggctgcatctgcgacctacatcacagctgacagcaacgctggattcttaacccactgagcaaggccagggatcgaacctacatcctcatggatcctagctgggtttgttaactgctgagccatgaagggaactccccgtttcacagtttattttacttatttatttatttatttatttattttgtctttttgctatttctttgggccgctcctgcggcatatggaggttcccaggctaggggtctaatcggagctgtagccgctggcctacgctagagccacagcaacgcgggatccgagccgcgtctgcaacctacaccacagctcacggcaacgccggatcgttaacccactgagcaagggcagggaccgaacccgcaacctcatggttcctagtcggattcgttaaccactgcgccacgacgggaactcccccgtttcacagtttaaatagctgtcactgccataaccaacacaacacaatacaacacccacaaaaacccaaaacaaacaagaaccaagacacggtgatggaggaaaaagaatcctccaaaagaaaaacagagctggatctacatttcattccctacattttcaacattccctacattttcaacaaaggattgtttcagcacatagtccaatacgccctccgtctgacagtcagtaaggctcaatgaatgcttattgagaaaccaactggaatactaagaggttttcatatagctctgtaatataagaaaacaaaaacaaataataacttcatagcataccctgaccaccaggttataatccttaaatccagcccaagtgaagtattcttttatccaggatgagtgacgaaatatttcatctcctatagcagcattcaagatattcaaatatgggccaaaatcccaggaatccttgtaaatcttagtcccttctggaggctctacgatgcccttgcttaaagacacaaaggggagagaacaatgaaaaaagaaagcaacaaataaggaaggcagaagtttgcacttctacatcaacagtcaactggatgagcagctctaaggctgctcagatagatgatgcccaggggtcccacagatgtgcctcagggaacattgaggagtagggccccaccccagcctaaaccaggtcagctcctgttaattgcttagtgtgatagctctccaagtcagaatacatttaaagacgaagtctggagttcccgttgtggctcagagggtgaagaacatgacatagtgttcataaggagacgggttccatccctggcctcattcagtgggttcagaatctggtgttacctcagctgcggtgtatgtcacagatgcagctcagatcccaccttgctgtggctgtggtgtagaccaggcagctgcaactcccattcaacccctggcctgggaacttccatatgccgcaggtctggccgcaaaaaagaaaaaaaaaaaaaagataaagatccatgtccggggaaaaaaaaagttggaataccacggatgtggaccctttgggctcaaataactaaattatgaaaatgttgaatataagtggtcttactgattttgtggacatccgcttattcctgccctgcccccacctccattagactacaagtatgatgaaagcagcaaccatgacagtacacagaaggggtcccataaatatttgttgtacataggaataactctagcctatctttgagctacacctagaattttgtgtctctcatatacagccctcttattatactaataataccacagctgatagacagatgggctgacaggagacccagtcagcagtatggacaagagtgtgctctgacatccctagagctgtccatccagtgtgaagatggatcactgcatgcaaggtggaatcttgagtcctggcaatagaataggacgtgatctggagaaaggaaatatgaggagggaaataggcatctgtgtagtaaagatttggcaggtaatggtaggtccctacattccacttctccaaacactgttggcccaaagccggagatgcactggttttggtgataaattatgtgtcagatcctaaaatgtctaacttctaaatgaatctcatatctgcttctctaaatccttgctccatctcagccagcagcctcacttatctcctcctggaaaaaagcacagtctcccagctggcccccctgactctaggagttcttccccaggacatggtttttctaaaacacaatgcagtaatattccttctttgctttatcgctttctcaagctctccttactcacaggcaagttccttgccctccaggcaaggtcttataaggactttctgaccctggtccaacacggcatccctgtctcatccttttcctttaccttcatttactgaaggggatgaatgacttcataagggaaggacctcttcacagctgtttcccctgtacttagcatgatgcccaaaggagctcaataaatcatttctggaagaatggcatacatctatgcacttattcaaagtaattgtactcactaagagcattgtaaatcaactatatttcaataaaaatattaaaaactcaaagtatctgcactcaccaaacctatgacattattttcaccccctttctccagcatatccctctgactggaacctcaatctcttaatcactctattggtaaccttctcctgacctctaagacatagctcaaatgcctaagattggaggttgagcattccctgtccacatctcctgttctctctagccctctccctacctcacaaggcagagctgagcactcagtctcccggaatctcttatactttgtcttactactgagaacctaacatcaactctcattacccagaatgctttggtgtgacacaatgatgcatatgcagattccagggctctgcttcagatctactgaatcagaatctcagggggtggagcccagggagctgcatttacccagtttccttgggttactctgacgctcactctagtttgcgaatttctaccataggatgcgtctggggaactagagagggataatggagagagttcagcaaatgccaggtgccagactcttgaattccccactaaaacgtgaaataattaaaatcttctctcaccttgaactagagaatgaaaactgcctttatcctagaggcactggagagatcctatggaattttaaacagggaagggaacgggaagagttttgcacttaaaaatcatttctttggcagcagtgcagagttggagctttcaaacttcttgcctaagatcccaggaagaatatattttacatcaggactctaggggtccatatgccaagagtatctgtgaaaccagagtttcctgaaataatacttacccttgttatatgtgctcaggcaacatactcagggttgttctatacaattttgttctacttctttttattttattttatttttgtcttttttttttttttttttttttttttttttttttagggctgcacttgcagcatatggaggctcccaggataggggtctaattggagctgatgctgcaggcctacgccagagccacagcaatgccggatcagagccacgtctgtgacttacaaaacagcccacagcaatgccggatccttaacccactgaacaaggccagggattgaacccgcaaccttatggttcctagtcggatttatttctgctgtgccacgacgggaacgcctatttcctttttctaaatgctagttgtgatgccattgatttcctaacccatcaatgaatcgtgaccagcagattgaaaaaggctggcatggaggatggatcagaggacagcggggctgggagcacagaggcaagtcaggggccactgccagaattctggttaaaaaaaaattgtgagaggctgaatcaaggccacagcagaagaggctggaggtgagtgatggatttttaagagatttgtgaaggagaattgaccagatttgagctgtgggaagttagtaaaagggtataatcagctgactgtgtcccagaccccagctttgcaaaggtaaggccaggagaagggtgtgcttttggtaaccgtgtgccctgatctccaacagagtcacagtccacttctaaataatggtgaggaatgatggttccatccggctcaagacaagtacttataaaaatacaggtctggaacatccacattaatgtttctgaactgtactcccagggcaccgttaattgttcaaatggactgtctggggattggcgaggaggtaatatttacactgataggaacactaactctcaggcttattgctttctacttgctgaagacaacttatttttgagctgtaataatggcccttcataaaaaaaactttctcactctttatcctgaagtaaggttctgagacaaggaaaacatttgagtaattatcttatttatttatttttttttcaaggccacacccacagcatatggaagttcccaggctaagggtctaatcagagctggagctgctggcctatgccacagccacagtaacgtgggatctgagccgtgtctgccacctacaccacagctcacggcaatgccagatccttaacccactgaggggggccaggaatcgaacccgcatcctcatcgatactagtcgggtttgttattgctgagccactacgggaactcctaattattttataggataagaaaattattatataggactgtgaaaaaactcagtctcccccccaccccagagttgaaagatacttatttaatagtttattttatacagtaagactcccactttaaagggtggtgtgtagatcttaatgcatgacaagctcaggatgctagtcaagaaaaacttaatattcctacaaacagggacctgccaagaggccataggtatgccctttattttctcataaacatgaaaaaattcagaaatcatttttgttccctgtaaatattcaagtcaaacctgtctgttgggtcctttagcatcctacccagatcaagagtggctccaggtcttggggtccaggttaccacctcagaattcttcttgataagattgttgagttcatttgggtcatttttgatgtttgtttccttaatatacctgacaaataagagcattcccatgtaaggcagtttattttcagatgacattcttatttgaacaatgacagaattattttttatttctttgcattcctacttcccaatccttcttttcttaccccaggaaaaataaagactatacttgagctaatgtccctgactagggaagagctgttagtcaaagaaggttgactctatacttcgttttttagtataagcatatagtgtttggaattgaagttagatgtacaagactattatacataattggtaatagcacactcttgtatttaattttttttattcatactctctgttttcaggctgcttgttaaaataagctccagacccctactaatcattctttctcatttcatgttgtttcacagctaaatcactcattcagcatatattaacttatgcgtaaacacgttatataaaatatccagccatacttgtctgctgggtgggattccacgaaatacccagcaaaggggcagtaaattctgggttgtaggtccttcaccagccgagccttgtagttcaggagtttcttcctttctgttttaatgaattgggctttccattcctctggaatgacagggtttggattagtcttctctgttcagaaatcacagaaaaacaaaagttctagtagattagaagtcttgcaagagataaaaattgacagttgagtgatgcagaagtagaacaaagctccttgtcattagtggctttattttgcaaagttggttactaggaaaatatcccaaactagtcaaagacattgaatcccctctttgtttacggcaattcatttggatccaactgaaaacacagggcagcatgcatagttgtaccctgggtgcatgcatattttaagggcactgtcgattaactctctactaacatgggcatggctttgttattttggtggaatataaaagtaaagtatgttcattacactctggagatgcacagtggtcaagagcatggatgttggagtcagtcaagatcaaaatgcagctccaccacttcaattctttaagtctgtttttctcctctgttgaatggaatcatgatgcctacctcacgtgttgttcatttgttcgtttgctcattctttcatttgatcgatatttattgagcacctactatgtgccagacgtagttctaggcactgagaatacagtggcgagcaagataaagcaggtccctgctctcatggagcattcattctagtgaaagaagcaaataatgaataagtaaataagttcatttcaaagagtgatgagctaggaagaaaataaaacagagccaccaaatagagagtggctggggtaaggatgaggacgggtgggatggaagggcatattagaagggtagttagtgaagatgacatctggaatcatagaccatagacacagacacagaagagaagttgctgaccacgtggtggtcaggggcaatagcactctaagcagtagaaatagcacatacaaagacccagggcatggagctacatggtgtactgagtctgaggaacgaaaaacaagccagtatggacttatgcttgtcaagcaatgggggtatgggcaataaaggaaattgagaaattaggcagggcccagagcatgtatggtaccatgtcaggtactccttctaccattactgttatgaaaatttgataaacacaaacaaggatacaggggaaaaaatgttacctataagctaggtgtaaccactatgaacatgttagtatattacagaccttttaaaatgtatgtgcatgtgcacatactcacacacatacacatactcacataagaactgaattatgctaccaccctttagtaggtatgttttgcctccctagtcacactgttaaccccataaggacagcaccttccctcatctctcacatggtgatgcattctgggaggcaatgaaatcagacttacagaaaaaaggaaggaactggacaggttttcttcttattgcaagtagggcatttttgacacattactaaacagagattacttactaaaaacattaatttattaagcagacatatattgaacacttacaatgatagtactgagcaaaggtatgaaaaaaatataccacttaaccatcctccccatcccagccccagaaccacccttagacacagagcagaagagcttctgccttggtccccacattttttctagctttgagatataactgacatctagtattacataactttaaggtgtacaacatggtgatttcatgacatgcatgtatggctaaatgatgaccacaataaagttagttaacaccgccatcacctcacataattaccatttctgtttgtgtgcacgtgtgtgtgtgtggtgtgtgtgtgtggtgtgtgtgtgtgtgtgtgtgtgtgtgtgtgtgtggttagaacatgtaagatctactctcagcaacttccaagtatatagtacaatatgctatctatagttgccatgctgtttattatacccctagaatttattcatcttgtaactggaagtttatactctttgaccactattttccctaccacccccccaacctctcgtaatcccacactttagaggggcttccttagcctcatccctcccccgtatgagctttccacgaggtcaagggtatgtatccccctcaggctgcccacactctgttctgaaccacatacaaagagcacttaagcctggattaccaatgtcagactctttctgatcagctctatgttctatgtcaggaatccatttgatccaaattattcttgatttttcctgagattctccctagtctccttagtgtttcatgctccatcagcatattctcagctggaaactttagtctatatttgtgacttgcaagtatgatttcccaataagattgcacacctcttgtgaggaagaaccatgtcctaattatctttgtattgattcacacagcatttagcaaagtgccatgccaactccttggcatcattttgatataaagaattaccagtaaattttccaccactgaaagtcattggaaagcctgaagctcctccagcaaaatcactcatcattaatgcaaccttcataggcagccttcctccattgggtctggtgcaatccactgtattgagtattttatgacctgtgggaaaacaaaatggcatcggactcaaggtgaaatcttgaacaccatagtttgaattctcaggccaacagtcttccatgtaagtctatataatctgcctcattcaattatcgaagaattgctcacatccaaggaaaagagagagtaagatttgaaaatttatactcttgagtgacacattttgaactttcaaggaaataaattcattctgtctgattcagtgggttctgaatgaggacacttagcctgattccactccaggatcataaacagactactttccttagcaaactatattcaaaggttaagctcaaaggatgcagaggaaagtaatcagatcaacacaactctctcaaccttttggaaattcttttcgatgattattggggtaaagtgtatgattccataacataataatattcaagatgaaagtaaaacatttattcaataatgtcagttttaaggaaattacaataggtgaaatataggatatttttatctgttgccttcaaaaaaaacctttgcacctgtcacggcatagagtacattactaattgattctctgtaagattatatgaatgacagtccattttcctaagacagagatagaatatactgtactctatggaaaatgaagagggaagaaacagatgaacataggatgatgttttggataactattattatcctttctaccaagagcaattttcattgctgatgagggtaagaaaatacctttgtattccacaataatgcaagtgtccatctcaggatgaacgccatccatcaagatcatgaatcgaagatttttgtctacctggaattcaacaataaaaccaacaacggtttacatctattttgcttttaattcaatatttgaagaaactgtcctctcttctggaaagaaatccccttttttcagaactggatttgttatccatcagagtcataccatggataattggagaggaagaccatcttatttcagctcaaatagagatttacacaggaccatgtacagaaaaagtaggccattgtttctttagtcttaaaatttctatctcgcctcaaatttatcccagaaaggataacccaaacatgtggaaagaacacagacctgctgccatattccaaatggcactacattgatattagtcaactggacgccactctgattcagattccaaaatacaggtctttccgtgttgccaacataaatgggaacatctggtcttctctcagcaagcttcttcagtgttgggtaactagggtcagaaagatatacaggttgaaaggtgaaaaaatagaataatctagtataagagagagtgtgatccttacaccaacacgttgaccgagaagcaaggaactgaaaaactagactctccccagagtccaaaagaagagctctttcctcaaggctgactataacagtgaggaggatttcctgggagagtcctctttattgttagaacatcccatataccacggcatgtatatcaaaccaggtgtgcaaattccgtcttccacactgatgctgctttgtgcaagggtagttctaacagaaagtacagagtggagaagttacgccaaagaggtttctggtttcatcttgattttccttttttttctcattcctcagtgcagctccctcccagtgagagaaaggtctcggccatatatctaagagaacggatgggtgcccaccctggggcagtttttcaaacttcgaaggttgatagccacacatggtatacagaatgaactccttgtccttaaagagagttagtcactaactaagcaagacaataaagtttagcacagaggaaaatgacatttacctcttgtagcaatcccaagtcagtacacaatgaaccatccaagcatttttgagtacttacataagttgccaactttcatttattagaatttattacataaaaggattatatactactgtgtgggtggcaaaacatgaacaataaacaaataaatggctctgtaggtatatttcaatcatagtgttacacactttcacatgttattgtatttgattctcaacaaaagaccctttcatcttttagtgtgcttttaataaatgaggaaacacactcagaaatatatgactaacaaatagtaaattggtattcaaattcaggctttctgatcctaaacttggtgcttcttctattgaaaggaaattctggagttcctgttctggctcagtgggttaaggacccgacgttgtctctataaggatgcaagttccatccctggcttcactcagtggatctggcgttgccctgagctgcagcataggttgcagatgcagctcggatctgctgttactacggctgtaatgtagggtggcagctgcagcttagattcaacccctagcctgggaactttcatatgttgcaggtgcaactgtaaaaaaaaaaaaaaaaaaaaaaaaaaaggcaattccaactctaatgaatgtgctatcaggtttaagaatcatatttgtacatagactataatgtctggtgatataggatatttactcataagaaaaatataaacaaaatcagcatatcagcacttattaaccatactaatattcaagttccaaaactatatttaatatgtagaatccagagggggaaaatcattaggttttcttctctaaaaacaagggattcaaaaaaaaatcaaggattctttgaacatgtctttaatctctgggttaacatctaaatcttccactttaaagggctttgggagttaggataaatgattctaacatggatgtattttaatttgtgatttttaaattattgacaattcttgctggtgtctattaataacactattataatactcatatatttacataataaaatcacatttctttgactaaagacagttttctaaagcatgctggccccctccccctttgtttttgtgaaccaataaggcattattcagtaaataaaggtcagacaagagcaatggagataaatgactctggtgtttattagttgagcaggtaagagtcaaaaaactcagggtcaattctgtcaaggaaataaactcaaaggagtgaaaactgcaaggcttggtaacttttcagccataagctatctgcaatacactacccaactaaagcattgtgatactacagttgagaagtggctttttaatgcctggcaactttgcccacacaagcccctgaaatcaaaatgaaattggttttcaggacagtggttgggaaatgaccagactgaatgccataaaaagttcttatcctcactaaaatgtagtatactcccatagaatatctcttgctaggacaatggcaatagcatcttgtgacaggcactataaagcaatcgcctccttatcttgacactgttctctctaagcaagctgtacaaattgactaccacacaacatagttattacacaatgcatgaactcagggctctcataatcctgaaattacaagtttggttccagaacctcctgtgggacaaagatatcatgtagtagacaagtagatttttaatcgtagcacaatactccagtgggtggtattcggtttttaagtgtgttacaggtaatttgttactaaagctgttaattacttaagtttttaaaccctttccttaaaaagcgagagaacacacctgtgccttcgagatctcatggactttcaatagaaaaatccaggggccagtcaaccaacaaacaatgtattttccctaaccatggacattactatcaaagtatatccttcatgtgaacttgtcatgtaaagtcacaggaaaaaaaaataaagttgaaattgcttcattttagaacaccatgggcactgctgggtattggcaacctggcagtagcaatacaaatttctcaataaggatgaacacataggaccctgtaatgaagccagggggttgggaataggagcattcacaaatatttgtaacagtccattcacaaatatttgtggtttttgtcaatgaaagttcctctttctccctcctatttgatcgcctggattcaggaagtttccgtttctatccttagtatcatatggctctggtttcactgaaggatgtggtggactcagggttcaaaagttgagagctcagtgttgtcgaaatgctacagatcaggagttggcaaaacacagcgacctgctgctgaatgctaggaagggcttttacctttttttaaagggttgaaagggaaatcaaaaggcaatcatgtttggtgacacaggaaactgtttgtgatattcacacgtcattgcctataaagctgaaggcaatcaggctccttaggaccgactatggctgcttttgtgctataatagtagagttaagtagttgcaatgccaaccatatgtcttgtaaaactccaaacagtttacactctggtcctttgtagaaaatgtgtgctgattcccaccataaatgttaaactaaaaaaggaagtcaactttgatgatccttaaactcagagttttaccaactagcctgagggtaggacgtgagagggtccagggttattaaccccatgctcctttccacaatagctcttctcacatcccaatggtataaaacaggaaggcactttaaaaaggaggctatgcatgttgctatggcagtggcgtaggcccggggctacagctctgattcgacccctagcctgggaacctccatatgccacaggttcagccctgaaaagacaaaaaaaaaaaaaaaaaaaaagtttttaaaaaaagaggctatgcaaatgcaagcatttatctgaattagttctctttttatcagcccaagcgaatctacctcagaatgagcagtgattacaaaaaaagctgaaaaccaacagtgcttttattgcagcattttcttcggagttgagggctcacccttccttacctcaggtggtctgagtgcatgtgactgatgtaaattaaatctgcgcggctcagcctctccagccaatcagatggaggctcgtgtagtaaccaccatcctcgcgcaaaagcaggaccgattaaccaaggatcgaacaccatcctcttgtctcccagcttgaggtccatgcaggcgtgagtaaggtacgtgatctgttggaagacagtgagattcagatgatcggatcattaccagccagaaaaaggaactgggctggttagcagacaagccacatgggggacctttgctcctaagcatgttcaatgacacaggactcaagaaagacacagcaggagcatttccgtagaacacaattcccagcacaggcattactttattagaacagaaatgctcatggtgggttttaggggtcaaaccagttgatttacccaactcaaatcacctccaaggtatttaattatgctctgtaccacagaatatcttttgttaccagtcttttagaacacaatttacaaggaaagggagttacagatgttatggcagacctctggggatttaaatggtagggtggctgtgaataggtataagaatgactggttccagtgggtggacacagtcatgcagcctggctgcactggcttctaaggctttctcacctaaattacttgcggactcactcaggatgtcaaggtcctttgagaagggtgaaaaacaatgacttagagacaggcagagactacaggattctaaatcaacgccttactcccttcccatagtctggcacgtccacaggaaaaatgaaaacaccaaggagcagagataaggtcacagaaatccaaatgtgaaaagccagcaaagaaggtagggagaggtcaagaaatcaaatgcaggtgattgtgcctcttctgggtaggttcccatttgtctcctcaaaaaagtaagagcccatttttacaagcttcccgaatactccagaaaaattaatttttggttgtttacctctcccaaactaccaaagtgttttctctggaggaaattctctctctctctctttttttttttttttttagggccatacctgcggcatatggaggttcccaggctaggggtccaatctgagctgtagccgccagcctacgccacagccacagcaatgccagattcttaacccactgagtgaggccagggctcgaacccctgtccccatggatactagttgggttcgttaaccactgagcaacaacaggaaccccgaaattttcttttaaaagtggaaaaatgcacagaaaagtttgtaaagatcttagggcaatgtgcagaaacatgtagctggccattttatctgacagtgatctggtagcaagggcagtttctgaacttcctcccatagctgtgcatgactctcctttgggacctctgctaaaagattttttttttaatctagatatatttccttgtaatccttgccaagttcctgaggttcctaaataatgtgctcaagaatttagaatagggagttccctggtggtctagtggctaggacttggtgctttcaccactgcggctcaggttcagtgcctggtctgggagctgagatccacatcaagccactgctcaccatggaaaaagaaaaaaaaaaagacttcagaataactttattatatgtcctaactagccacttccaagaatactcaaggtaatataagatgtaaaaaaaaaaaaaaaaatatatatatatatatatataaattgatatgttagctttatttgtgtttttaagaatattataatttaacatttccttacctgcacttccccaaaagccaaatcttcaggagatctgggttctgaatcccacgggttaggaggatttagttctagaagcaaaactccattttcttcatccttttctacaactagaagcaaaggtggacaaatctggataatcaaccaaaaaaatgacttttaaaaagcatcgctaagacagaaatgcatggctcaagtacatggagtagacaaatcaaagcaaaatcaaaataaaaggcaacgctcatttgggtcaagcaacatctgcagagatgagggctgaagaccaatactgttcatctcgctattcacattccacgtaaggaactcatgagatcgcagatgtgtcagagacacaggcacaccaccaccaacttcattacaatcaaatgaatgattgatagagatgagttcaaggtgctgtggaagtgtctcggaaggaaaaccttgtttggttgtaagagtcaaagctgatttcaaataggaggtaatcctccagctgaacttgaaagacaaagtatttgggggctgacaaaagagatgtgatgatgggatatctcttttggataaaagataaaaggacaacataaaagataaaagaacagcatgtgcaaaggcatggaggcatgggagagctggatgttcacaaatgactggaattttatgaccaaggagaatggtgtctgaaccaggtgggagagacaggtaggtcagagtgggtcatgaaggaccctagattcccaactaaggaggcgtctggatttcatcctgtggcaatgaggggtcaatgaagaattttaagcaattgtggcaggcatgctggtggcttgcgcaaaacctattctctccttctcccttactattagcatcctaattgtgtgatggtacacctatttaaagatttcccagccccctggcagttatgagtggctatgtagacctagcactatgtgcagtttacatagttctggcgggtgagacgtaagcagacgtctacttcagaagtctcacgggacttgcaggaacacatttatttccccgacaaagagggacaactcaagagaccagcactgtctccccttcatcccttcatatttccccctcttgtgtggaatttgactgccatgcttggaggagcacaagccatcttgagatgctgaagaatagagccagacactgaggatagaacaggaggtgatagggaatttggctccttgataaacacagaacaaccataatgcccaggattacctgcttgggatctaagaaaaacaacctcctatatgattgagcaacttttgcctggtttttctattgcactggctgaaagcaatacctaagtgctatagcaagggagaattaaaatcagaacttaattttagaaagacccgctgtgaggcacatggagaggatcaattggagggaggcaagaccatgtttgagagtcctctctgttgttctggaaggctatcagcaaaccactaatggacatgtgcttgggagacagatggcctgtttctagccctcactctcccacttaatagcttattagctagaggaccttgagcaacttatttgacttctccagtgtttttatctctaaccctggctatctccacacacagttaatcctattactgccagcaattttattcattactaaatgaaagcagatgaggtcccaagccaaagcaaaccttgtggaaatggcattgccgccctgccctcaaagacgagcactttcctactttattcaaaggacattaaaaaatgttttgtgggagttcccactgtagtgcagtgggttaagaatccaactgcaatggctcgggtagctgtggaaatgcaggtttgatccctagccgggcacagtgggttaaaggatccagcattgccacagctgcagtgtagggcacagctgcaacttggagcctggattcaacccctggcccagaaactttcatatgctgtgggcatggccctttaaaaaatgttttgcttacattttccaaatgaatattaattatactcactttaagacaactgctagtggaagaaactgaagtaaaaattacccgtaaaatgaaaaatggcacaaatgaaactttccccagaaaagaaaatcatggacatggagaacagacttgtggttgccaagagggaggaggagggagtgggatggactgggagtttggggttaatagagcaaactattgcatttagggagttcccatcgtggctcagtggttaatgaatccgactaggaaccatgaggttgccggtttgatctctggcctcactcagtgggttaaggatccggtgttgccgtgagctttggtgtaggttgcagatgaggcttggatcccgagttgctgtggctgtggtgtaggctggcagctgcagcttcaatttgacccctagcctgggaacctacctatgccaagggtgaggccccagaaaagacaaaaaaaaaaaaaaaaaagacaaaaaaaccccaaaacacatatacaatagatgcaaactattgcatttggaatggaaaagcaatgagaccctgctgaatagcagagggactatatctagtcacttgtgatggatgcatattatctgcatcctgggctgcaatttcctgatctgtcaaataggattatgatacatactttgcagagttgttgtagggattaagtgatataataaatcctaaagtgtcactatgcctagcacagagaaggcacgtaataaatgatagtattattatggcaattatttcaccctcaaggaataaagaattaaaaaggaggttcaagactgaacaaacaggagttactatcatggctcagtggttaacgaaactgactggaaactcaggttcgatccctggccccgctcagtgggttaaggatccggcattgccacgaactgtcatataagttggaccccgctttgctgcagttgttgtgtaggctggcagctgtagctccaatttgacctctagcctgggaacctccatatgctgtgggtgcagccttaaaaagacaagagacaaaaaaaaaaaaaaaaaaaaaaaaacccacaaagattcaagaaacaaaattatatgctagcacataaccagttcaaaaatacaaggaattgggaattcccattgtggctcagcagaaacgaatctgactagtgtccatgaggtccatgaggagacagattcgatctctggcattgctcagtgggttaacaatctggcattaccaagagctgtggttaagtcacagatgcagcttggatcccatgttgctgtggctgtggagtaggctggcagctgtagctccagttggacccctagcctggaacttccatatgccacaggtgcagccctaaaagcaaaacaaaacaaaacaaacaaacaaaaacccaaaaaaaccgaccaacaaacaacaacaaaaatcccaaggaattacaggagactttcagaaaactacatcgatatccatgcttaaggattttccttctttagaagtgttctttttcaagaaaagcaggaaaaactgagtctgcagttcttaactattatttcaaagccaataccataaaagtttttatgccccttgctcaaagataaattgcatttatgcactgaagaaaatcatgacatctgccaactgcctgcatctttatagaatgtggtatccttactttgaccacataaactaatgacatctaagttatttggattatgacttaatatttaaccagaagaacaaacaaatggaattcattaaaatttttaatagggaggaataatgaagaggaattataataaaaacatattagaaaactataataattaaatcatagataattggcataaggacgaagagaggatcctaattaaataacagtttaatatagtctaagagaaggaccataaattagtggaagaggaagggctgcctgatacacagtgctgtgcaatggttagttaagtattccaggtgcttaaagacacaaagaaaagcaaccaagtgcttaaaaagtatgaaaaaaatggcatatcacaggggggacttctaagtttaatagcaatggaaataattccaatggaaaatcttagtagatagaaaagtaaaatgaaaaatttctaccacctaagaaaatgggcaaacacacttggaatatataagcatcgtatttgaaaaacaagtataatttaaaacaatgatgctatttttggttcaaatgaggaacgtttgaaaaactagaatgccctgagctgataaggaatgaggagaaaaggcaggctgattaagtagttaatgggaacaaaaattggttgggttctaaaaaaatggattataatgcaatacacattaaagaatgggtaaatgaatagtggactcattcattcatttaggacctcaagttaagaggattatgttaaccatatttctcagttcatgacacattatattcagtccaggcagagctacttacttactccctttatctttgttttctactcttctttactctcctcccctgtaggcaaccatttgaaagttcatgcaaaatatttactacattgtatgtgtgcatctttaatttttataaatggtattgggtttccaggctgtttcttactctttttcattcaaatctatgtttctaagatacattcatgttgccatgtggacatctcatctctaactggagtttcacataccctggtgccacattttattgattcatgctcccaggggtggacccatagattctgccacaacaggatttctttggtacataaacaggcgtgggattgatgggccacagtgtattcataaacctgctctgcctaaccactgtcagattactttcccacatgactgcaccggccatactcccaccacaggcatgacgatttttatatcctttatccctgacatttgatatcacctttgtttctaactttttatcagtcaaaaagatgtaaagtaaagcacctcattgcttcagtctgtagttttctaataattaataggtttgagcatattttcatgtgcttattgacttttggagatttttcttttgtaaaatgctagttcatatcctttcttaatttttgtattttcttaatttttatattgggtttcctatctttttcttgtcgatttgcattacttcctcctataagctggataatattccctcattggttgtaaatattgcaaaataatcactcaaactatcatatgttctttaactttgtccatggggtcttccagttcatagaaatctgtagtgtatcgatgatatcttattcactaggtttgtgtatatgtgtgtttcttttttctttcttttttccctttgggctgtacttttgaagtattgtttgaaaagtcaagaagtatcagtaatctctaggtcacaaaaatagtctacatttcttccattactttcatagtcttaccttcctcatttgagctatcagtccatgtgaagcccatctttatgttaaagtatgaggtgttaaaaaaaatgggcgggagttcccgtcgtggcacagtggttaacaaatccgactaggaaccatgaggttgcgggttcgatccctggccttgctcagtgggttaacgatccggcgttgccctgagctgtggtgtaggttgcagacacggctcggatccagcgttgctgtggctctggcgtaggccggtggctacagctccaattcgacccctagcctgggaacctccatatgctgtgagagcggcccaagaaaatggcaaaaagccaaaaaaaaaaaaaaaaaaaaaaatgggcgaaagcatgagttagtcatatccttttgccagtaattcatttgtctcacagaaacaactccaaacacaaagcagctcttacgcacaatgatcacagtttcgttttgatggaaaaaaaaaattatgaacagtctaaatttcaacaacagaaaaatggctaaataaatcatgtaagttaatatttaatgtaaacatactttataattgtgtatatatggaatctgacctaacatgactactataataattttaacaagacaaaaaacaggataaaaaaagtaatatataaaataattacaattgactggaacaactagatagaagatgaacaaggaaatagaagactcgaacagcactataaactaactagacctaacagacaaaaaaagcacattccaccagcagcagaatacacattcttctcaagtacatttggaatattctccagcataaactatgttatataaacgtttcaataaattttaaaagatcagtcatacaaagtatgttctctgaccacaatgaaatgaaattagatactaataagagaagaaagttggaaaattcacaaatatgtggaaattaaacaacatacttctaaatacaaacagtttaggaaagaaatcacaacagaaattacaaaatgctttgatacaaatacaaataaaaacataacatgctgaaacatagaatgcagctaaaacaatgcagtgcatagaaggaaatttatatctgtacacacctataataaaaagaaagatctcaaataaaaaaactaaacttccaccttaagaaattagaaaaagaagatcaaactaaacacaaagcaaacagaaggaaggaaataagaaaaaaaattagagctaaatggaatttagaccgggaaaacaagagaaaatcaatgaagataaatgtttgttttttgagggagttctcgtcatggtgcttcagaaatgaatccgactaggaacctgaggttgcaggtgtgatccctggccgagctgtggtgtaggtcacagatgcagcttggatctggcattgctatggttgtggtataggccagcagctgtagctccgattagacctctagcctgagaacttccatatgcctcaggtgcagccttaaaaagcaaaaaaaaaaaccaaaaaacaaacaaaacaaaaaagttagttatttgaaaagattaatacaattacaaacctttagctaaactgaccaagaaaaaagagaaaagacccaaattactacagccaggaattaaaagggggatattactatcaatctaaataatccaaatgaaatggagaaagtcctaggaagaaacaaatgaacaaaactgactcaagaagaactagaacgtctgaggagcagacccataacaaattaaagagatttaattagtaatcaaaaaacttttcacaaagattagccatggcccagatggcttcactggtgaatctgaccaaatgtttaaagaagaatcaataccaatatacttcacaaactcttccaataaatagaaaaggagggaacacttctcaattcattctatgagagcagtaattattactctgatccccaaaccagacaaagatatcacacaaagagaaaactacagaccaatattccttatgaatatggacatagaaatccttaattgaatattagcaaatataatttagcactataaaaaagaattatgaccatgagcaagtggggtttatgctagcttgattcaatataggaacatccatggagacagtaagtagattagtggttgccaggggctgagggaagaagggaatggactgctaatagttagaaggtttctttgggggatgatgtgaatgacctggaattatatagtgatagtaatagcacaacatgtgaaaatactaaaaaccattgagtcaaacactctaaaagggtaaattttatggtacctgaattgtattccaataaaaggagaaggaggaagaagaggaggcaggggagaggcggggaaggggaccaaggtgacaactggcagataccaaaacactgatggaaatgtaggtgagagtcttcttccttctactttcctaacatctaccttttttaatgatgaccatacaatgttatttatttaacaataaaaccaaataatctcagctcacatgggattgagccatccttttctttcttgggatgtggtatgaaatcactacagtattggtagcactgtactgaaaagtgggttctgttaacaaaattttctactctcacaacattaccttactggagcagaggctgaaaactgcagtgggtcttgttatttccagtcctccactgaccctactgacaactctggccctgcccttcacctgccgtggcagtgaacatcaacgctttgcatcatttcctggcctcagtctattttccagtttacccaactttctgctgggtgggaaatccctccttcctgctccacaggacccagtcacaaggcatatggcagactatttgagtcatacatatacaagcaaatcattactctgtactctgtcgtaacacgttctgaacatttaacagatgttctttcaacaacccagtaaaatcactactaccaatattatctcccattgaggaaactaaagaacagagactaacccacctaaagtcatttaattgcatgtttgagcatcaggatatgaacccacgctagtgagccccattcactcttaaccattttgctaaaaggtctcactataggtcttatccaaaagacttagctcccttaaggagctataagtttctgggttacatactcataaagtagatggtcaattgtcctctcacctacacaaacagtttaagacagtcaaacttttgcttcttatctctttttttttttaatcagatgaattaaatagtatttgtacagcacatgtaaccagttcctgctaacaatgtgatctgaagatttcctaggctaggtcaacagacaaagggtgggggctttctggcaaaagaaggaaatggttcaggcatccctttgaggggcaaggtgagaattagtcaatatttccaaaagtcatttaattgtgttagatcaaatctacttttttatttatataacagtcattctaaaacagtgtgtaaaagcagttttaagaatcttcccaagtaactttttatactgataaagacatttttaatcacttagaacagagacaaatttattcctatgattaagcccttcttactcatatttctataggctttcttgagtaggaagaaggaaaaagtagaagtggagccagcatgagaatcacacagaagctgtagcctctaacgtgtgccagaaagagtcatggaatttgaaggactttatttcccaactggaattgtgagtttcattataacgtctcattatatcatctcatttacgccgactctatcttatccatctttgtatttcttaatacctagtgcaatgtttacacatggtaaggtctcatcaaatacttactgaacaaatgaatgaatgaagggattttttagagaaaacttgcctagaattttcagtgatggttacttttaaaatacctcagtttaaaatcagaatgcatccaaggcttctaatgagattggaaacaagttgacaagagggaccccaatgacagtaacagcagaaaacattgatcagtattgatggtatttacccagttcgtcttgacagaagcttccaggaggattgatatacttcatgctgcttacatctaacttccagttgtgttttgtgcatttaacagacctggatggaaaattgtacttaggtttatgaaatggtgaaaataaatattaatctatttaaggcttaaatgcattattctgtgatcaaagtaaacgactgtagttggttgaacacaaaactcatgaaaggaaaaaaatagctaatattcaaatatccaaggaaatataaactcatcatcagtaggtgattttgaaagtgaagatattttttccttgtatttgatttttgtcagtttgatttgtatgtgactttgcacatttctccttgggtttatcctgtatgagactcttcgtgtttccctgacttgagtaaagtgaagataaacaccatggcacaaaataacgtgttagagatcagcagagccatcagaataaagtctgctttggagttccaactgtggctcagcaggttaggaacctgagcagtatccatgaggatgtgtgttcaatccctggcattgttcaatgggttaaggatccagcattgctgcaagctgcagtgtaggtcacagatgcagctcagatctggcattgctgtggctgtggcataggctggcagctgcagctctaatttgaccgctagcctaggaacttctatatgctatgggtgcagcccttaaaatttgtttttttttttaaagaataaagtcatctttaaggatgactctcatacaaaagctaagctgagtaagatccaagtggggccagtataaggaaataatgtagtaataaagattatctgtgatttaatagtcacactataacccttggcccctagtatagtgtactaaacctaagatcaactcaaattttcatttgtctaagaaaaaagacttcctgattgtttaaagatttctgatcatggttgccagataaaatacaggaaaaatataaatttcagataaataaaaaataattttaaaatgtcttacacaatattgaacatatattggaaatttgtttatctgtaattcaaatttaactactcagctttgcatttttatttgttaactctggcaacactgcttcagaatgagaatcagattaattgtagcaacaaaggaggcttagtaatattttttccatttcttaccagacggtgatagggatgtgatagttggagatagggcctaaaagttccatttcctctccatatttggtagtctgtctggctgtctttctttctttctttttgctttttagggctgcacctttctttttgctttttagggtggcatatgggggttcccaggagaggggttgaatcggagctgcagcaacaccatatccttaacccacttagcgaggccaggcatcaaacctgtgtcctcatggatactagttagattcatttctgctgtgtcccagtaggaactcccatattttggtagtgtttccagtcaagtttttttttaaacagttcaagattttttttttttttaacagacaaatatgtcttcaaccagaaatatcagattgtttaagctaacaatgtctattttcacttatatatcagtaaactatgctgattttttccaagcttcattacaatcaagaatttttaatgctcttttctagtaacaaggcagaaaacatattcaaacttcgacttatggaggatattttgtgacacttcctttctcatcaatgagtaactaacaactatcatggctcagaggttaacgaatctgactcgtatctatgaggacgagagtttgatccctggcctcgatcagtgggttaagaatccagtgttgccgtgagctctggtgtaggtcaaagattggctcgaattgtgcattgctgtggctgtggtgtaggccagcagctacagctcacattggatccctagcctgggaacctccatatgccatgggtgcggccctaaaaaaaaaaaaaaaaaaaaaaaaaaaaaaaaaaaaaaagatgaaataaataaattaacaaaaattgaaaacattccaaatgcagctattcagcaggctgggtcgttaaaggagaaatgtggcagtgtcacaactgctcatgggcagtaggcagaaaggagagagaggacagcttcatgtgccaagaggctgtgaaattagattgacaaaatgaggaccacagcttatgagagttcctgatcttgattatgtacaaagaagaaaaatggctgaggaagggaaggtggaacaggtaggtcactgcccttgactgtatcgtggaagagatatttcaggtgaattgctgcacagagagcctaagtagaagcagccaaatttggagagatggatgggggagtgtaccatgtaaactgctcttgggatggagtttcagcatataaatgcttggggagctgtatctgggagcaaagctgggtgaatctggctccccacctgcagcagagctaagatggtgccatctccatgttagcctgccaacagaataggttgaaactgggatcgttcaccccctaaggctttgggtgaaggagaggaagaccagtctgtggcaaagcaattaccatattaagctgagcaagccagattcaagaacagcctgaattcctgtaaagaacctctgttcctaagctacgcaagatcatggcagagtaataataatagcaaatgtaagtgacatttattgagcatgtatcatatgccagacattattttaagtgctttagtgtatgaaatcactccatcctctcagtagccagacagagaaggctttgtctactttcattttcactttatgaggaagaagagcgaggcccagaaaggctaagaaatgtgtccgaggtcacagagctgctaagtggtggagccaggcttctaaaccaagcagtttgcaaggaaagaccatgctcttaatcataaagctgcaacactcccttaaacaactggctaagacaacaccacaggacatggcccactaaggagaaaaaaggacagagaaaaagcagagtccccgggccacaagtcggaagacctcaaggcctgcacgtgcctgcagaagcttcttggtgacagaacaacctatggctgaggtctccctaacttgaaaccacccagaagatgcaagggactcaaaagcagtctgtcagcaaacaaccaagaggttcttccagagtaggctgcctaccaaaagtatgtcccatgcagtgcctgaaacatatctaactaaaaatatattcgttgtttatctgaaatgcaaatttgactgggcaccctctatttgcctaatctagcaaccctatctgcagagccaagcaagctacaggtatgacagcacttaacctgggagctgggccctgaagctaagtatgcagtgatgcaagtctgtgggccagtgtaagaagattccagacttgggtggtgatcttctatacagttagagcagggagttcttggacagctaccagttacctctgagtccattcgcactaaactgcccacagatgacctgagaaataagattgacgacacgacacggtggaagacaagcctaatatggaaacggctgaaacactacgagagtcaagttaggctgaagcaaagcttgaaagatggggtcaatccctcattcattatcagtggtgagcatcaggctgacaaaacacctccacccagaactccccctggctctgcaagctgtgctagctctttgtcaatcactgaaaagaaagcccaaccatcctatcctagaattgctcctgagatggggaggtaagcgatatgcaggtttaatcaaggggctggggaaaaggcgtaccagcactcgttcttccaagaaatgatcagaagagccgctgttgaggccaggtgcagctagagctctgccatttttcgggttttcatcagggaaagtctctctgttctagggcagtgtttggacaagcactcacctcacacacacacacttctgagagagcaggaaaggaaatccaaaagaggcttgagtctttgaatataaaagctggtaaacacacacacacacacacacacacacacacacacactccttagaagtttcactgtttatcaactaggaatacattttaaacaatagttcttcagagaggatgggaaattaagtcaaggtcataaatcaaaatcagagagctgccgtaaaggagcttaagaaaaagttaggcatgtgctgggggaaatagcatgttgattggatcatttaaaatttctcaatgagcacatttcctgccaaacctaattgggagaaaggatcgccagggagaaagcaaaggattctcagtaccttccatttagatcctcaatgtctttaatgaagaggcctccttggtgcttgcacatgttcttacatgccttcaggcggctcttattcttaaataagatgtaatccttgccagtgctcttatttcgaacaaaattgattccttccttgagattggcagcttcggcaggtgagaggcacaacaggatctccgtcgtttgttcgatg

SEQ ID NO: 15 - DNA, 1734 bp, Sus scrofa
atgagcagcatcgaacaaacgacggagatcctgttgtgcctctcacctgccgaagctgccaatctcaaggaaggaatcaattttgttcgaaataagagcactggcaaggactacatcttatttaagaataagagccgcctgaaggcatgtaagaacatgtgcaagcaccaaggaggcctcttcattaaagacattgaggatctaaatggaaggtctgttaaatgcacaaaacacaactggaagttagatgtaagcagcatgaagtatatcaatcctcctggaagcttctgtcaagacgaactggttgtagaaaaggatgaagaaaatggagttttgcttctagaactaaatcctcctaacccgtgggattcagaacccagatctcctgaagatttggcttttggggaagtgcagatcacgtaccttactcacgcctgcatggacctcaagctgggagacaagaggatggtgttcgatccttggttaatcggtcctgcttttgcgcgaggatggtggttactacacgagcctccatctgattggctggagaggctgagccttgcagatttaatttacatcagtcacatgcactcagaccacctgagttacccaacactgaagaagcttgctgagagaagaccagatgttcccatttatgttggcaacacggaaagacctgtattttggaatctgaatcagagtggcgtccagttgactaatatcaatgtagtgccatttggaatatggcagcaggtagacaaaaatcttcgattcatgatcttgatggatggcgttcatcctgagatggacacctgcattattgtggaatacaaaggtcataaaatactccatacagtggattgcaccagacccaatggaggaaggctgcctatgaaggttgcattaatgatgagtgattttgctggaggagcttcaggctttccaatgactttcagtggtggaaaatttactgaggaatggaaagcccaattcattaaaacagaaaggaagaaactcctgaactacaaggctcggctggtgaaggacctacaacccagaatttactgcccctttgctgggtatttcgtggaatcccacccagcagacaagtatattaaggaaacaaacatcaaaaatgacccaaatgaactcaacaatcttatcaagaagaattctgaggtggtaacctggaccccaagacctggagccactcttgatctgggtaggatgctaaaggacccaacagacagcaagggcatcgtagagcctccagaagggactaagatttacaaggattcctgggattttggcccatatttgaatatcttgaatgctgctataggagatgaaatatttcgtcactcatcctggataaaagaatacttcacttgggctggatttaaggattataacctggtggtcaggatgattgagacagatgaggacttcagccctttgcctggaggatatgactatttggttgactttctggatttatcctttccaaaagaaagaccaagtcgggaacatccatatgaggaaattcggagccgggttgatgtcatcagacacgtggtaaagaatggtctgctctgggatgacttgtacataggattccaaacccggcttcagcgggatcctgatatataccatcatctgttttggaatcattttcaaataaaactccccctcacaccacctgactggaagtccttcctgatgtgctctgggtag

SEQ ID NO: 16 - protein, 577 aa, Sus scrofa
MSSIEQTTEILLCLSPAEAANLKEGINFVRNKSTGKDYILFKNKSRLKACKNMCKHQGGLFIKDIEDLNGRSVKCTKHNWKLDVSSMKYINPPGSFCQDELVVEKDEENGVLLLELNPPNPWDSEPRSPEDLAFGEVQITYLTHACMDLKLGDKRMVFDPWLIGPAFARGWWLLHEPPSDWLERLSLADLIYISHMHSDHLSYPTLKKLAERRPDVPIYVGNTERPVFWNLNQSGVQLTNINVVPFGIWQQVDKNLRFMILMDGVHPEMDTCIIVEYKGHKILHTVDCTRPNGGRLPMKVALMMSDFAGGASGFPMTFSGGKFTEEWKAQFIKTERKKLLNYKARLVKDLQPRIYCPFAGYFVESHPADKYIKETNIKNDPNELNNLIKKNSEVVTWTPRPGATLDLGRMLKDPTDSKGIVEPPEGTKIYKDSWDFGPYLNILNAAIGDEIFRHSSWIKEYFTWAGFKDYNLVVRMIETDEDFSPLPGGYDYLVDFLDLSFPKERPSREHPYEEIRSRVDVIRHVVKNGLLWDDLYIGFQTRLQRDPDIYHHLFWNHFQIKLPLTPPDWKSFLMCSG

SEQ ID NO: 17 - DNA, 1328 bp, Sus scrofa
cttatagtaactttattaccttttttgtctgaacagttagtctttcttaatgtttctaggagagaacattagttttattttgaagagcacccactcagcgtatttgtcttacataacatgcagaacatgtatccacatttaaaaatttatctcattgtagtacatacttttacaaggtattccataaacactgaaaactataagaaacatatacatctaagaatcctactttatatagtctttcactaaataatactattttcatatacattttcaggtatttctagcttctcctgtgtatttagaattatgtatgtaatcaccaagagaatatgggccccttggaaggaaagcagtagaagcccacggagtaaagatctttctttaaaaagcaggttttattattgttttaaatacctcttggttatttgagattctaagaacttcgattaagtcccaaagtggaatgatcccttaataaccagacgataggaaaggtgaggaaagtgtcagtagcagggccaggacttggcacattcactaagaatgtagcacctcagtgtagcttatagtatagtgcctgggcagagttactgctcaacagctcgggatgatgaaccatctgctgccctgcaagtgtgggagcagctaacttggtgactgcaatccatggacagttagggcttgatgtatggtgtatgtagagagatgatggcagaggtagattctctccggcccatccttatcagtagtgccgtgattatgcttctctctgtgttcgaggagatcttttagacctgtaagaagagagggagagtgtgaaagactctggtttcagtctgagttctgcttggaacacactgaattcatagataatcccaagttctcaggtgaagtgtggtgagatttcctgctacacaatcattgtgtgttacaggggatcctttttaaaaaaggccaggaaaggcttgtgggaaatttggtatctttgcttggatagttataactctgcctcaaggttgaaatgacctattgacacttctagatagggaatcaggtgacttgatataccacataagatgacatctcagtatataagcacatgaaggtaatggcacagtggtggtaacactcttttaagccaaagattcccaggaaggcccaatgcaaatatttctaacttcccaaaattgacatttcttaaagagaaatacttctgcaagcagtagcaaacctacctttctttgctaattgctttcagtaaattcttgatggtcttagactctggattcagacatcttttctccccattctttttcattgtggca

SEQ ID NO: 18 - DNA, 1173 bp, Sus scrofa
acgcgggggagacactcttcaactgctcattctgagcctactgcagaagaatcttcagctgcagcaccatgaaccaaagtgctgttcttattttctgccttattcttctgactctgagtggaactcaaggaatacctctctccagaactgttcgctgtacctgcatcaagatcagtgacagacctgttaatccgaggtccttagaaaaacttgaaatgattcctgcaagtcaatcttgcccacatgttgagatcattgccacaatgaaaaagaatggggagaaaagatgtctgaatccagagtctaagaccatcaagaatttactgaaagcaattagcaaagaaaggtctaaaagatctcctcgaacacagagagaagcataatcacggcactactgataaggatgggccggagagaatctacctctgccatcatctctctacatacaccatacatcaagccctaactgtccatggattgcagtcaccaagttagctgctcccacacttgcagggcagcagatggttcatcatcccgagctgttgagcagtaactctgcccaggcactatactataagctacactgaggtgctacattcttagtgaatgtgccaagtcctggccctgctactgacactttcctcacctttcctatcgtctggttattaagggatcattccactttgggacttaatcgaagttcttagaatctcaaataaccaagaggtatttaaaacaataataaaacctgctttttaaagaaagatctttactccgtgggcttctactgctttccttccaaggggcccatattctcttggtgattacatacataattctaaatacacaggagaagctagaaatccctgaaaatgtatatgaaaatagtattatttagtgaaagactatataaagtaggattcttagatgtatatgtttcttatagttttcagtgtttatggaataccttgtaaaagtatgtactacaatgagataaatttttaaatgtggatacatgttctgcatgttatgtaagacaaatacgctgagtgggtgctcttcaaaataaaactaatgttctctcctagaaacattaagaaagactaactgttcagacaaaaaaggtaataaagttactataagccaaaaaaaaaaaaaaaaaaaaaaaaaaaa

SEQ ID NO: 19 - protein, 104 aa, Sus scrofa
MNQSAVLIFCLILLTLSGTQGIPLSRTVRCTCIKISDRPVNPRSLEKLEMIPASQSCPHVEIIATMKKNGEKRCLNPESKTIKNLLKAISKERSKRSPRTQREA

SEQ ID NO: 20 - DNA, 16125 bp, Sus scrofa
  modified_base (2290)..(2290): a, c, t, g, unknown or other
  modified_base (10685)..(10784): a, c, t, g, unknown or other
gcagtggacagtgcgccaccatggagttggggcctctggagggtgggtacttggagcttctcaacagcagtgccgaccctctgcagctctaccacctctatgaccggatggacctggctggagaagaagagatcgagctctgctcaggtgggccctcctccctctggcccttttcaagtccttccccagccctctgcctgccatggagcgctgctcagcaccacggacagctccagagcccgccccccgggggcgggctcctcgtggggacatctcccagcctgcccggctaccccctccttccccaccagccctctttcctggctctttcctgcttcatccaagtggcttttcctcccagaacctgacacggacaccatcaactgcgaacagttcagcaggctgttgtgcgacatggaagcagatgaagaaaccagggaaacttacgccagtatcggtgaggaagcattctgagccagaaaaaggacaagcgaggggaagaggcttcttttctctttggttaatctcacccactcaccaggagccagcaggccctacctcagaaatctgggccagggggatggggagtgagggctggaaggacggagaatcagggaagaagagagatggagaaggggagggaaatagaccccttcaccaatgaacaccaggcaattaagtcgcacttttacagagctcccattgtggctcagtggtaacaaccctgacgagtaaccacgagggtgtgggttcgatccctggcatcgctcagtggggttaaggatctgctattgccctgaactgtggtgtaggtcgcaggtgtggcctggatcctacattgccgtggctgtggtatagaccagcagctgtagctctgatttgacccctggcccagggacttccacacattttacatggggccctttaaaaaagacaaatctcacttttacatcctctgcctctatttctacatctttttctattagttgctcttctttccttccttcccacaaagcctatgtcatacaccgctccctctctcccaagctcccaagctaaactactctagtatttgtagtaactaccatttggggagcatttgcagcctgctaatcgctgtgcgtgtcttatcacattgaatccttacaaagacaaaggaagtagatattcttagtattttcactttacagatgaggcaactgaggtttagcgagataaagcaattcacccatgtctgcgttagagacagtaatgggcatgtctgaaattctaactgaggtcttatttttaaccacaaaaaccaaagtacctagggtggggaggtttgctaaggcttaatctaagaggctggtttgcagctttattgtttttttttttctttttagggccacacctgcagcatatggacgttcccaggctaggggtcaaatcagagctgcagcagccagcctgcaccacagctcatggcaacaccagatccttaacccacagggcgagcccagggatcgaagtcgcatcctcatggatactagtcgggtttactgctgccgagccacagtgggaattccttgtttgtagctttaaaaagagcgacacggatcccacgttgctgtggctgtggcataggctggcagctgcagctctgatttgaccgctagcctaggaacccccatatgatacaggtatggccctaaaaagacaaaaaaaaattaagagctgcattataaactacaacagaaaaaaatgttaaagactacatatgtacaactgaatcattctgctctacacttgaaactaaaacaatattgtaaatcaactatacttcaatttttaaaaagagcctcagctttcagtcaagggtagaactctttggggagaaaagtttctgttctgttgtgttttttgcggggtaggatggggtaaaggctctctccttaccagggacatcgctctcttatacagaggctttgttcaaatataaaaagatgctccttcttctggaggatggagcccccattaagaagtaacagcttgggagttcccgtcgtggcgcagtggttaacaaatccgactaggaaccatgaggttgcgggttccgtccctgcccttgctcagtgggttaacgatccggcgttgccgtgagctgtggtgtaggttgcagatgcggctcggatcccatgttgctgtggctctggcataggccagaggctacagctccgatttgacccctagcctgggtacctccatatgccacgggagcggcccaagaaatagcaaaaagacaaaaagnccaaaaaaaaaaaaaaaaaaaaaaaagtaacagcttggctatcaaagtgcagtctggatttctgccccttttgccctcttggctaggcccccttgtacagtgaacaaccttcacaactgtttttagtggcccttttcctggcaacccaggaacgacatcccttaggaggtctggcataaatgtggccagtctttccacagcacagagggcagaaaatggagaggaacagtaaccgtacgtgtctcaaaaattgcagaactgagagcctgcctgtttcctttcctttctgggaatttacttgctggaaggagaaatatttgggcctgagggtattcacagttcctcacaactggaggtagtaacgaaggatttgggctttttcccaagtcacttaggaggggggactttttccctttagaggcatctacacaggaagcgggagcatgtggaggaggcagcttcgcccaagtccgttcctcaaacctgtgctcctagaatctctggccaggtagtcatttgagcaaccttggcttctatagagataaactgggaataataatcccacctgcctcgtggaatgactgtttctgtgcataaagtgattagaacaggattttgcaaagagtgagcactcagtaagtgtcaggttccaccccaccacgaccaccaacaccgtcatgtcatcattatcatgtttgtcatcgtcttcatcaccattatatcttccctccatttcctcagcacagaagccttgtatggctccccactgcctataaaatcaagtccaaactttccccgacatgaaacttttaactgcagataccagtctctaagagtttcccaaacggctttcctccctctgtccccaccacccagaaagccctcctctttcctcctcgcagactctgccccatctttctttctttctttctttttttttttttttttttttttttttggtctttttgccttttctagggccgctcccacggcatatggaggttcccaggctaggggtctaatcagagctgtagctgccagcctacaccacagccacagcaacacgggatctttaacccactgagcgaggtcagggatcgaacccgcaacctcatggttcctagtcggattcattaaccattgcgcctcaatgggaactcctgccccatttttcaaagtctagctccaggacgtccttctctgggacatcctccctgattgccccatcccactttacaccctctcctgtatctcctgccatgataactgtcatcctgttggctccaagccaggttccacttcatacagtttacaactgcttactgagtgtcagctgtgtactgactactgtgttgactgctggaaaggcaaagcctatacgcctcaccatccatccctgaattgtaggcattacttgttctcatcacgtagaggaggaaacggggacctaactggcctaagtttgtacggctagtagggtgagtgaggggtagagctgaaatttaaactcaaacccaagacagctctactatactactggcactactttatagtactagatacacatcatccctctgattaggttaagagcccctgaagagtcagtgatcattcattcagcaaacctttatggacccccattgtgggccaggtctggacagtcatgactgcccaatgcccagcccaaggccaggcacacaataagcgtgaggtgaaaactcactgattgacggcacttttccttgtctggacagcggaactggaccagtatgtttttcaagactctcagctggagggcctgggcaaagacattttcagtaagttggggggtggggggttcttggttcagcctgcatttccttccttgttccttagggggcatggaaatacccagaggccacccttcaatgagaagtcacgttcccttcccagtgtagggacaatgagggctcatctcggacatcctctgactgtgtgtcttggtgtctttggttttttctctgaagttgagcacataggattggaagaaatgatcagtgagagcgtggaggtgctggaggactcagggcggaaaagtcagaaaagatgtgagtgagcgtgtttcccccccgccccctgccatccaacctctcctggcttcattcctggccctgccctggctctaaaacctcccagtcgcattccttgttaagccttgcctgctctgacctggctttgggtgtccccccacctctcctctcaccactgctccctcgagacccagagaggaagcaagtggcccagcagcagatggtccctctcctggtgggtctctgtttttgactgtcatttccaaaagacctctgggctctggcttctctttcatccttagttgtcacccctgtatttaagggaggtctcttcaaggacagtctttccccagcaagatctgggtttgaattccagatctgctatttaaggtctgtgtgaccttgggcaaataattacacctctctgagcctcctagtcagtctgcctgcctcctctgtctgtcctcacctggcagccaacatgggcttttgaatgcaaattcaatcatttggctggcctgcagaccctccaatggctcaaaatacataccacaaggatctgtaggatctggcccttccccctctccaaattcacgaatgtgagtcactatgctccatccagccacactggcttctttccattcctgtaactcttgtaccctttccagcctcagggcctttgcacttgctgttggccctgtctggaatgcccttcccccgtttcttcccatagtggcgcctccgaatcttgtaggtcttggccaacatgttgcctcctcccgaaggccttcttccatcaacttttccacataaattaaccttacttactttcaccttgtttgtgtctctccagcatcacagcccttgtcacaatctggacttgttttaggtattggcttttgcttagttcccccaccatggggacagggaccttgtctttcttatgtaatcactaccttccccagcacctggtacatgcctggcatgcgggagcatctccataaatatccactgaatggaaatttccaggagttcccatcgtggtgcagcagaaaggaatctgacgagtatccatgaggatttgggttcaatccctggcctcggtcagtgggtccagaaaccagcactgccgtgagctgtggtataagtcgaagatgaggctcagatcccgtgctgctgaggccttggtggaggccggcagcagccgatttgacccctagcctgggaatttccacatgcctcaggtgcagccctaaagagcaaaaaaaaaaaagaaaaaaaaatttccacaaaatgggcatcacagctaattgaatgcttactctaggccaaaccatgtgtaagccctgaacctatttaatttgaacaggtaaacagatgcatggcataaaaattcaaaaggtgcgaagaacagtcagtaaaaaaaaaaaaaaagaaaaaagagctccttcccactcgtttcccagtctttcattttccctctctgaagacaatctatgctgccagtttcctttttgtcttatattttgcctaaaagccagctctttaaaacaatgttgccccacaagtggcatttcacccaccgtctcgggcacctggctttcttcgtttaccacgtcaggacggcgatttccacaccacgatggaaaacacgtggtcctcccgcccaggaatttccctttcctttccttctttttttccttccttccccctttcttctttcttttcatttcataagcattttcccccaatattttaccatgtggtgtagggtgcagactacaaaatttctgtctttttttgcgtgtcttttagaccccaggctaggggttgagtccgagtgtaggtgccggcctacaccacagccacagcaatgcagagtctgagcctcgtctgcaacctacaccacagctcacagcaatgccagatccttaacccgctgagcgaggccagggagcgaacctgcgtcctcatggatgctagtcgggttcgttaacccctgagccacaacgggaactccgaaaaatttcagcatatagtagaggtgacagaattgtactacaagcaaccacatacccactgctgacaacctaccatcagtgttgggctatatttgccttaacacatctctatccatctgtccatccctctatcatccacccatccatccattttccaggggaacgtgtcaaaggacgttgcagacgccagtactgcccacacatccttccacatccttgttatttttagggctgcatggtatttcactgggggatgaatcatcgtttgtttcatcagcccctcgctaaggacacagctgggtttttctctgttgatgtgtgccgtgcttgatatgcactcactgatttccagtgcattcctgcaaaatgggaatcaacacccctgtttcacagatgagagaacaaaggctcagagaggctgtgtagcagagacaacacggccaggaagggcccaaaagcaggtggtttgtctttgttttttttgttttttttggtgggaggttgtttttgtttctgtaatggctgcacccatggcatacgtttccagggcagggattgaatctgagctgcagctgtggcaatgccggatcctttcacccactgcaccaggccagagatggaacctgtgccttcacagcgactcgggctgctacagtcaggttcttaacccactgtgccagggtgggatctcccacagatgtttttttcatttttattattattatttttaaactcaaactcttcctgtgtctcttctatggttctgcctcttccagtgcctcactgccctgggtgcttcaagatggggtttgggctcaagcaaaagagtgggggcagaaatggtcggaggaagaggagggaaagggaccccccaggccacttcccagccatttaaggcaaggccacaaggcctaactggggtccacaggcccgtcctggctgggtctgatgaccgtgtgttctctctgaagctttcccggaggagctgcctgcggatctgaagcacaggaagctaggtgagcagggcgggtgcatccagggagactgccaggcagggaagctggggtctcctcaggtgtgcatataaactagcatttaaaagctgaggctcagagaggtgaagccacttgttcaacatcacacagcaagtgagagttggagttgggattcagactaagatcatgaatccacagtgcgtgctctgcagttcaaggactgttgggagattcacctctacccacaaaacctattttgaactctgagtcagagctgaggacccccccaccccaccttgttccactgcccctccaggccacagctctcctttcggaaggcagcgtcacctctggtcagctggttacccggcggttcccccctcccatgcctcaatgagcctcttccccatgcctccatcccccccccaccagatgcttcctcccctcccttcctccctcctccctgattcggttgttattgcaaaggtggggaggccagctcccctgtgagaaagagactgagaaatgaaagcctcatagtctgatggaggaagcctggtctctactcccaggtctaatctgatggagaagacagggaccccaaccaggaggaccccagcgtgatggagacccccaatctgataggggaggcgagtctccgccctcctgagctcctgattcaatggaggagataaactcgtgccccagggagacagcaagtgctcgaggtccctggaggctatagaaggtggtaggggcctgggctaacaccctcttcttaggtgtgtcccgcctgcgcccggctctccaaggcaggaagtgctcagggaggaagccgggggtgggggctgtgtgacacagcacagttgctgctcagaccagcttcacccaggactgagaagaggacaggaattcccttccactgccagcagagagttccactctgctccctgagcactccccaccctgggaaggaccctcagggcacccacccagatcttaccaagcctctgacacggccccctttctcatagccgagcccctcgccatgcccatggtgactggcactttcctggtggggccagtgagcgactcctcagctcgaccctgcccatcacctcctgctctgttcaacaaggaatcaacacccagccaggcccagctggaggacgctgtcccaatgccgggtaggttaggggcttggaggggcagggcttccccttcccgcctccccgcaggtgcctgaggagtggctacttcaggagccacaagggacaggaactgctccccctactactgtcacccacttccatcccagccagtcctaccccccagggtccccctcgactccgtctgtgccagagaatgtgccctgggcatcacagcagggaatccctgccaaccagggaattcactgccagccctatgctagttcgcttgctttcctcagcagtgaaccgtgcaccctctctgggccagctgctctgctgggtgccagcaacactgtgctgggccagcagacaaagcttttcaatctcctccaggctctctcgattagagtccttgagaagggagtcagatgttaattaagatgctcaagtgctgggagtttggagttaatagatgcaaactattgccttcctgcgtggataagcaatgagatcctgccgcatagcacagggaactatatatctagtcagtcacttgtggtgggacatggttaaggatgatgtgagaaaaagaatgcatacatatgtacagctgggccactctgcagtacagtagaaattgacagaacactgtaaatcaactataatggaaaaaaataaaatctttcaaaaaaaaaaaaaacaaaaaacaaaaaagatgctaacggagaaccctaccttaccatcttggtctcttgcagcgcccccttcaggttccttgttgagctgcctgagtgtccctgctggacctattcagatcatccccacgctctccaccctgccccaggggctctggcacatctcaggggccgggacaggggtctccagtatactcatctaccaaggtgagcgtgggaagccaggctccccaccccctctgcctgtgacctgactattccctgacgccatccttttcccaccccaggcatttagtgcttacagcccagcaccttctcaggatcctccgtccccatttccccaaactcaaaagagaggagcaaagctcccgcgtgttctaagcgacccaagtgcctaagtgaccttttttggtcacttttctccacgaagccttagtttctcccttttaagaaaaataacttcattatactttaaaatccaaatatttatgtatgctcattaagaaaccaaaaaataagacctacttacaagagtcacggagtctccccatcgctctttttagtataccgttgtgaatagtttggtatggatccttgcacagctttctcaaagttgtcttgtttccgggtctgtaagaaggtccttgctgacctgccacattggagggttttaaattgtccaagggaaggcacgttgggctctcagggatgggagagagaatgaggctaaggagatatttccactcaactcaagagcatcctttgaggactttccactgtggcacagcagaaatgaatccaactagtatccatgaggatgtgggttcaatccttggcctccctcactgggttaaggatcctgtgatgctgtgagctgcggtgtaggtcgcagacacggttcggatcctgcgatactgtggctgtggtgtaggccggcggccgtagctccgaatcaacccctagcctgggaacctccatgtgccgcgggcatggccctaaaaagcaaaaaaaaaaaaaaacagtagaactgcgctgccgcttggctcacagtctccggttttacgggaatggggttagtttctgggtggtctatggccaattgtcttgcctgacccgtgcttggtccgcctcgcgcggggactttctgggtggcgcacacacctctcagccaagatggattccagcgccaaggatcctgggaagttggtggtctcctccctcccacaggcccctcccacgggcccctcccacatcctcccggttagtcttcagggcagcagcacattcctcacggggcctcctgtttcgagacacctcctgctagtggttgttatcctgcctggccgaggtggacagtttcggccagtcgtcccctaacagaagcacttgccctgctcccaaggagctggttgtgtcccttcacagatggggaaatcaaggctccgggagctccatgtcactccnnnnnnnnnnnnnnnnnnnnnnnnnnnnnnnnnnnnnnnnnnnnnnnnnnnnnnnnnnnnnnnnnnnnnnnnnnnnnnnnnnnnnnnnnnnnnnnnnnnnacgagagccagagctccagcagcttccaagtggccaggtgagtggtggcagggtccctctgcccaggtgctggacgtagaagcccaaatccgacttcccttcatgcattcacccaacacttgttcaatctctcttttgttggctcactcattcattcattcactcattcattcacatgctcattgcatcttcacatcatctcatcactcattcctctggttatacctacatttaaagctacctttaccgaggacctgccccggggaagcccatgctgggcgtcaatatctttttttttttttttttgtctttttttttgttatttctttgggccactcccgcggcatatggaaattcccaggctaggggtctaatcggagctgtagccgctagcctacgccagagccacagcaacgcgggatccgagccacgtctgcaacctacaccacagctcacggcaacgccggatcgttaacccactgagcaggggcaggaaccgaacccgcaacctcatggttcctagtcggatttgttaaccgctaagccacgacgggaactcctgggcatcaatatcttgttagcgaggctgagagagtgaatgaagggagcgtgggtgaccgagggaactaagacaggagtggggatgaaagggcagctgactgctgagtctgactctgtccctggtactccaacacaggagatgtagtaaatcaggaaagtcccaacctgactatggtccccattttgtggaggagaaaactgaggcacagtggggtatcgcacatgctcaagataatactagtaagtggtggagccaggacttaaaccagaaacatggattccactatcttaaccctcaacacacacacacacacacctccccagaatggtctcccaatcgtgagtgagcaaaagaagaaaatcttggagtgggtaaatgatggagaagatgagggaatgaatgagcgaatgaggcagctaatccagaaagccatcagggaagacgggtgaatggacgaagaagctagtgatggtggccgggctggcctctcggctgccctcctggtagccggtcctgccactagcatcctcccctcccccactcccgcctttgacctgtgcagagactgtggagcagttccaccactcactccgggacaggtaccaagccaagcccgcaggcccggaaggcatcctggtggaggtggacctggtgagggtgcggctggagaggagcagcagcaagagtcaggagagagagctggcctccctggactgggcagagcggcagccagcccgagggggtctggcggaggtgctgctggccgctagcgaccgccaggggccacgcgagacgcaggtgatcgccgtgctcggcaaagcaggacaagggaagagtcactgggcccaggccgtgagctgggcctgggctgacggccagctgccacagtacgactttgtcttctgcatcccctgccactgtttggaccggccggggaacacctaccgcctgcaggatctgctcttctccctgggcccacagcccctgcccatggacgacgaggtcttcagttacatcttgaggcggccggaccgcgttctgctcatcctggatgccttcgaggagcgcgaagcccaggacggcttcgtgcacagcgcgggcggacccctgtcctcagaaccccgctcccttcgggggctgctggctgggctcctccagcgcaagctgctgcgaggctgcaccctgctgctcacggcccggccccggggccgcctggcccagagcctgagcaaggccgacgccctgtttgaggtggccggcttctccgcacagcaggccaagacctacatgctgcgctactttgagtgtcggggggcccgtgagcgccagaagagagccctggagctcctccaggcacagccgtttctcctgagtcacagccacagcccttccgtgtgccgggccgtgtgccggctctcagagaccctcctggagctgggcgaggaggcagagctgccctccacgctcaccggcctctacgtcggcctcctaggaccagcggcccgcgaaagccccccgggtgccctggtgggactggccagactggcctgggaactgggccgccgtcaccacagcagcttgcaggagggccagttcccatcggcagaggccagggcctgggctgtggcccaaggcttggtgcagcgtgccccgggggccccgggggcccctgagctggccttctccagcttcctcctgcagtgcttcctgggggccgtgtggctggctctgagcagcgagatcaaggacaaggagctgccgcagtatttggcattaacccctaggaagaagaggccctatgacaactggctggaggctgtgccacgctttctggtcgggctggtcttccagcctcgcgcccgctgcctgggagccctggcagggctggtggcagccaccttggcggaccggaagcagaaggtgctcaacaggtacctgaagcggctgcagcccgggaccctgcaggcagggcggctgctggagctgctgcactgcacgcacgaggccctggattctgggctttggcagcatgtgctgcaggggctcccgacccaactctcctttctgggcactcggctcacgcctccggacacccacgtgctgggcagcgccttggtggctgcaggccgagacttctccctggacctccgcagcactggcattgacccctctggactggggagcctcgtgggactcagctgtgtcacccatttcaggtgggggccggggacaggagagagggcttctttgcattgagcacctactgtggttttgctgctgtgcccagtgctggctctgtggggtctcattcagtaggcatggcagccagatgtgggcagaagtgattccactcatttgaagatgaggaagccaaggctcagagagggagagtagcttgcccgaggtcacacagccagtgagaggcagcatcattcttttaaccactgtttgaaagggccatgttccaggcactgggccatgtctagagtctaagactgatctgggttcaaattcattttcttctctccatcccctgatcaagtcaccattttgtcatggttagattaaaaccacagcctcccctgacttccctgcccccgttctcgcctcttccactccattttattttattttattttattggtttttagggctacacctgtggaatatggaagttcccaggctaggggttgaatccgagctatagctgctgccctacaccacagccatagcaacgcaggatccttaacccactgagggaggtcagggattgaaccacatcctcatggatcctagtcaggttcgtcaccactgagccatgacaggaactcccccactccactttattcttaaccatcagagcaatctccctagtaattgcatctgatcatctttcatccttgcttacaatcttttagaggcactccacctccctcaggttgaagtcaaagttccttaatttaaggaatctaaatcctcctgtgatctgtttgatcccttaagccttatttccagagaatctctcctaccttccctctaagcatattttaccagagctataaggtctacaccattgtaatggttcaacggagaattcagcactgagcttcctggtagccaaagcaaaaaggaaaagaaaacccaggagagctaagaaaaaggaggaattgataagggcttaagtggtcatggaaggctttctagagaaagtagggggttaagctgagcaaagaaagtacctgaataggtaggaggtcccttcatggagttgcccatccgttatggtctagcccggtcaccatgcctgggtctgaggcccttcctccacagggccgccttgagtgacacagtggggctgtgggagtctctacagcaacgtggggagaccaagctactccaggcactggaggagaaatttaccattgagcctttcaaggccaagtccatgaaggatgtggaagacctgggcaacctcgtgcagatccagaggtgaggaggaaagggcacgggaggtggtccaggccatgcaggtccattacatttgtcattagcacttccagtgcctcatctttgggggatatcccatgtcctccgcttggacagtggccacccagaatctctcactgttgtcaccacccatgcagaactcccaggatttatcacttggtcccattaaaaacttgcagtcatgttcccaatttttttttttcttttttaggaccacaccttcagcttatggaagttcccagatgaggggtcaaatcggagctatagcttctggcctatgccacagccacagccacagcaataccagatccaagccacatctgtgacctacaccacagctcatggcaatgcttgattcttaactcactgagtgaggccagggatcgaacccgtgtcctcgtgtgtactagccaggtttgttacccctgagtcacaatgggaatccccctaattctttctcagctaaagccagggaactattctctgctgctaagagttcacgagctgccttctgcatctagtaacagaagtgacactatggccacctttcaaggcagccaggaccagtatcatccccatttttttgatggcagagatctaatgtctagtgggtagaggacacttgaccacagaacaactgcctttccctcattccttcatcatacattgttcgagcacctactatgtgctgtctgggatgggatgggtctcctctgaggctcttttccatgaaacacacaggaatattagccttcataacatcctgttctgaggcttttctttttaagaagggcataacaaggagttcctgtggtggctcagcaggttaagaacccagctagtctccatgaagacaggggttcaatccctggccttgctcagtgggttaagaatctggtgttgtgtgaactatggtgtaggtcgcagacacagcttgggatcccacgttgctgtggctgtggcgtaggccagcggctacagctccaagtccccccctagccttggaacttccttatgccacaggtgcagccttaaaaaaaaaagaaaaaaaagaaaaaaaagaagggactaaccatagcccgggaaaggcagtccttctggggaattttgggaatgtggcatgcatcttagtacatttaggaagggactcagcgacaggtgaaggtcccctgacattgcccattctctccatctctccaggacgagaagctcttctgaagacatggctggggaactccctgctgtccgggacctaaagaagttggaatttgc

SEQ ID NO: 21 - DNA, 4456 bp, Sus scrofa
ttttttcacttcacgttttggatgctgcaggccgggtaagcagagatcccaaggctctggcccccggggaagaggccctgtctccgagccctaccatgaaccacttccagaccatcctgactcaggtccggatgctgctgtccagccatcggccgagtcaagtgcaggcgctcctggacaacctcctggcggaggagcttctctccagggagtaccactacgccctgctccaggagcctgacggtgaggctctggccaggaagatctccttgacactgctggagaaaggagccccagacctggccctcttggggtgggtctggagtgcactgcagaccccagcagccgagaaggaccccggctaccaggaacctgatggcagtggacagtgcgccaccatggagttggggcctctggagggtgggtacttggagcttctcaacagcagtgccgaccctctgcagctctaccacctctatgaccggatggacctggctggagaagaagagatcgagctctgctcagaacctgacacggacaccatcaactgcgaacagttcagcaggctgttgtgcgacatggaagcagatgaagaaaccagggaaacttacgccagtatcgcggaactggaccagtatgtttttcaagactctcagctggagggcctgggcaaagacattttcattgagcacataggattggaagaaatgatcagtgagagcgtggaggtgctggaggactcagggcggaaaagtcagaaaagatctttcccggaggagctgcctgcggatctgaagcacaggaagctagccgagcccctcgccatgcccatggtgactggcactttcctggtggggccagtgagcgactcctcagctcgaccctgcccatcacctcctgctctgttcaacaaggaatcaacacccagccaggcccagctggaggacgctgtcccaatgccggcgcccccttcaggttccttgttgagctgcctgagtgtccctgctggacctattcagatcatccccacgctctccaccctgccccaggggctctggcacatctcaggggccgggacaggggtctccagtatactcatctaccaaggtgagatgacccaggccagccaagcaccccctgtccatagcctcccaaagtccccagaccggcctggctccaccagtcccttcgccccgtcagcagctgacctccccagcatgcctgaaccagccctgacctcccgggcaaacatgacagagggcagtgtgtcccccacccaatgctcaggtgatcaagaggcctccagcaggcttcccaagtggccagagactgtggagcagttccaccactcactccgggacaggtaccaagccaagcccgcaggcccggaaggcatcctggtggaggtggacctggtgagggtgcggctggagaggagcagcagcaagagtcaggagagagagctggcctccctggactgggcagagcggcagccagcccgagggggtctggcggaggtgctgctggccgctagcgaccgccaggggccacgcgagacgcaggtgatcgccgtgctcggcaaagcaggacaagggaagagtcactgggcccaggccgtgagctgggcctgggctgacggccagctgccacagtacgactttgtcttctgcatcccctgccactgtttggaccggccggggaacacctaccgcctgcaggatctgctcttctccctgggcccacagcccctgcccatggacgacgaggtcttcagttacatcttgaggcggccggaccgcgttctgctcatcctggatgccttcgaggagcgcgaagcccaggacggcttcgtgcacagcgcgggcggacccctgtcctcagaaccccgctcccttcgggggctgctggctgggctcctccagcgcaagctgctgcgaggctgcaccctgctgctcacggcccggccccggggccgcctggcccagagcctgagcaaggccgacgccctgtttgaggtggccggcttctccgcacagcaggccaagacctacatgctgcgctactttgagtgtcggggggcccgtgagcgccagaagagagccctggagctcctccaggcacagccgtttctcctgagtcacagccacagcccttccgtgtgccgggccgtgtgccggctctcagagaccctcctggagctgggcgaggaggcagagctgccctccacgctcaccggcctctacgtcggcctcctaggaccagcggcccgcgaaagccccccgggtgccctggtgggactggccagactggcctgggaactgggccgccgtcaccacagcagcttgcaggagggccagttcccatcggcagaggccagggcctgggctgtggcccaaggcttggtgcagcgtgccccgggggccccgggggcccctgagctggccttctccagcttcctcctgcagtgcttcctgggggccgtgtggctggctctgagcagcgagatcaaggacaaggagctgccgcagtatttggcattaacccctaggaagaagaggccctatgacaactggctggaggctgtgccacgctttctggtcgggctggtcttccagcctcgcgcccgctgcctgggagccctggcagggctggtggcagccaccttggcggaccggaagcagaaggtgctcaacaggtacctgaagcggctgcagcccgggaccctgcaggcagggcggctgctggagctgctgcactgcacgcacgaggccctggattctgggctttggcagcatgtgctgcaggggctcccgacccaactctcctttctgggcactcggctcacgcctccggacacccacgtgctgggcagcgccttggtggctgcaggccgagacttctccctggacctccgcagcactggcattgacccctctggactggggagcctcgtgggactcagctgtgtcacccatttcagggccgccttgagtgacacagtggggctgtgggagtctctacagcaacgtggggagaccaagctactccaggcactggaggagaaatttaccattgagcctttcaaggccaagtccatgaaggatgtggaagacctgggcaacctcgtgcagatccagaggacgagaagctcttctgaagacatggctggggaactccctgctgtccgggacctaaagaagttggaatttgcgctgggccctgtcttgggcccccaggctttccccaaactggtgaggatccttgaggccttttcttccctgcagcatctggacctggactcgctgagtgagaacaagatcggggacgagggtgtcgcccagctctcagccaccttccctcaactgaaggccctggagacgctcaacttgtcccagaacaacatctccgacgtgggtgcttgccagctggccaaggccctgccctcgctggccgcgtccctcctcaggctgagcttgtacaataactgcatctgcgatgtgggagccgagagcctggcgcatgtgcttccagacatggggtccctccgggtgctagatgtccagtacaacaagttcacagccgccggggcccagcagctcgccgccagcctgagaaagtgccctcacatggagacgctggcgatgtggacacccaccatcccgtttggtgtccaggaacacctgcagcagcaggactcaaggatatcctgagatgatccaggctgcacccgggacaagcacgttctctgaggacgctgaccacgctggaccctgacctgatcatctgtggacacagctcttcttaggctgtgtcccgtgagctttggcgatctggtgcccagccctggtggctcagagtcagcccccactctgctggggaaaggacccacggcctgctctgtggacagaccccaggcccggccccaggctccttcggggcccagactgatgtcagccttgctcagccgctgcagtcctggcagacaggcgggcacccagtggcagsyagggkccacccgggagccctgaagcactccctgcaggacactgcagacagtggtggccaggtcagagtgagggatgtggcggccacatcacctgcccaggtcctgctggccgggggagaaagcacctctccacactgctcccctggtggggtaagcttggcgctcagaagataccagccagcaccccccagcgtgttgatttcccaaacggtgaccgacggggtgtccacggcagctgccctctgcctccggcacctgcgggtttgcactcactttgtttgccgaggccaaagctgggcctggccagacacgccrgaccttagcgggggaagagccgacagtacactacgggmcgaggyrgggtggcgagggtctggaaccacatccgccttcttgccctcacgtcctgtgtcttttttcactacattatacatggcttattcagtctca

SEQ ID NO: 22 - protein, 1204 aa, Sus scrofa
MNHFQTILTQVRMLLSSHRPSQVQALLDNLLAEELLSREYHYALLQEPDGEALARKISLTLLEKGAPDLALLGWVWSALQTPAAEKDPGYQEPDGSGQCATMELGPLEGGYLELLNSSADPLQLYHLYDRMDLAGEEEIELCSEPDTDTINCEQFSRLLCDMEADEETRETYASIAELDQYVFQDSQLEGLGKDIFIEHIGLEEMISESVEVLEDSGRKSQKRSFPEELPADLKHRKLAEPLAMPMVTGTFLVGPVSDSSARPCPSPPALFNKESTPSQAQLEDAVPMPAPPSGSLLSCLSVPAGPIQIIPTLSTLPQGLWHISGAGTGVSSILIYQGEMTQASQAPPVHSLPKSPDRPGSTSPFAPSAADLPSMPEPALTSRANMTEGSVSPTQCSGDQEASSRLPKWPETVEQFHHSLRDRYQAKPAGPEGILVEVDLVRVRLERSSSKSQERELASLDWAERQPARGGLAEVLLAASDRQGPRETQVIAVLGKAGQGKSHWAQAVSWAWADGQLPQYDFVFCIPCHCLDRPGNTYRLQDLLFSLGPQPLPMDDEVFSYILRRPDRVLLILDAFEEREAQDGFVHSAGGPLSSEPRSLRGLLAGLLQRKLLRGCTLLLTARPRGRLAQSLSKADALFEVAGFSAQQAKTYMLRYFECRGARERQKRALELLQAQPFLLSHSHSPSVCRAVCRLSETLLELGEEAELPSTLTGLYVGLLGPAARESPPGALVGLARLAWELGRRHHSSLQEGQFPSAEARAWAVAQGLVQRAPGAPGAPELAFSSFLLQCFLGAVWLALSSEIKDKELPQYLALTPRKKRPYDNWLEAVPRFLVGLVFQPRARCLGALAGLVAATLADRKQKVLNRYLKRLQPGTLQAGRLLELLHCTHEALDSGLWQHVLQGLPTQLSFLGTRLTPPDTHVLGSALVAAGRDFSLDLRSTGIDPSGLGSLVGLSCVTHFRAALSDTVGLWESLQQRGETKLLQALEEKFTIEPFKAKSMKDVEDLGNLVQIQRTRSSSEDMAGELPAVRDLKKLEFALGPVLGPQAFPKLVRILEAFSSLQHLDLDSLSENKIGDEGVAQLSATFPQLKALETLNLSQNNISDVGACQLAKALPSLAASLLRLSLYNNCICDVGAESLAHVLPDMGSLRVLDVQYNKFTAAGAQQLAASLRKCPHMETLAMWTPTIPFGVQEHLQQQDSRIS

SEQ ID NO: 23 - DNA, 45862 bp, Sus scrofa
cacatgaactggacaggccccaggtacataagaaaaaggcccctagtccagtagccaataggattcctcctttctgaaagtcacagcgcttttccttcctgagcagagtgggggcgggggaataaagttgcggccacagagtggacttgagctccccctggaggcccaaacgattatttgcaccaacttgtcctggcttttggagttgagcgggaagaatccgagggtcttcattcaccgtcctggaaggatagttttgtcagtggttttggtccaggctgctcggttgtgcctgaaaagtcacggctgaagggagcgctgtgtgacggttattgtttgtgccttgacttttgcttccaaatcagcccaaaagaaactctgctttttttttttcttttctagggccaaacccatggcatatggaagttcccaggataggggtccaatcagagctgtagccgccggcctacaccacagccacagcaacgccagatccaagcctcgtgtggagactacaccacagctcacggcaacgccgggtacttcacccactgagcaaggccagggatcgaacctgcaacctcatggttcctagtcggattcgttaaccactgtaccacgacaggaactccaccctttctgttttgaaaggcacacagacaaagaaaacagtcgtatttattattctggacactttgcttctaagtcataggaagcaactcagattaggttaaagaaaaatggggaattataagggcactgtgttttataaaatcccagggcaggactgtagccagagctcaggaaagaaccagaaggttttcagaagtctctcatttcagctcagtggttaacaccctccgagagttccattttaactttgctgtggtggcacagcagaaccctctccccaaggaaggtgacaggaacgtccttaaaatgaggaagaaccgcatggcccaatcaccctctctacacgtatgcacagcccagactgtacccaataagactgcaataaggctatatgttaccatataaaggggacaaaggggtaaaaataatataaaaggcatctcctcactgtgctcagggctcagcctttggacatgaatctgtcgagccagtgccggcatgaataaatactgcttcctggaaaaaagccttggtgggtgtcccatctctgtacgtaagtcctacaacagttccttcctgctagagtagaaggttccagatcctggggcagggaagaggttcctagaacctactgatgataactacagcacatcaaaacagtccctgctgggggatgttggagcatgcaacaactgccatgaaagtggacaactctatctccctgtatcaagagtgcatgtttcaggagttccctagtggctcagagggttaagaatctaactaatatctatgaggatgcaggtttgatccctagaatagttcagtgggttaaaggatctggtgttgcagtgtagatcaaggatgtgcttggatctggtgttgctgtggctgtggcacacactggcagctgtagctctgattcaacccctagcctgggaacctccatatgccgagggtgcagccctaaaatgacaaaaacaagaaaacaggaatgcaagtaagtcaggagttccctggtggttcagtgggttaaggatctggcattgttactgctgtggtgagggttttattcctggcccaggaacttctgcatgccacaggcacagccaaaataaataaataaataaataataaattaagtggagttcccgtcgtggcgcagtggttaacgaatccgactaggagccatgaggttgcgggttcggtccctgcccttgctcagtgagttaatgatccggtgttgctgtgagctgtggtgtaggtcgcagacgcggctcggatcccacgttgctgtggctgtggcataggccagtggctacagctccgattggacccctagcctgggaacctccatatgccgcgggagcggcccaagaaatagcaaaaagacaaaaaaataaataaattaaataaataaataaattaaataaattaagtaaaatttaaaatttctaggagttccctgatggtctggaagttaaggatttggagttgtcgctgctgtgactcaggttgaatctctggcctgggaacttctgcaggctgtgggcacagccaaaaaaaaaaaaaattaagacaaaaaaacaaagcaaataattcatcaggaaggcagaaattttttggaagcagacctaggagaaaataaatatttgtttaaatatgtaaatgtttatttatattttaactattttatatatttaactttccttttttttttttttttttttttgctttttagggccacacctgaattatatggaaggtcccaggggaggggtcaaatcagagctgcagctgctggcctacaccacagccacagccactcgagatccgagccacgtctgcgacctacaccacaccacagctcacggcaacgccagatccttaacccattgagcaaggcgagggatcgaaccttcaatatcatgattcctagtcagatttgttaaccactgagccatgacaggaactccagtcatcttttgttttgaggacataaagtaagaggtatagagaagcacttccccaggggtctgaacaatgtataggctatttagggaaacaggtggttattataactggaggtttgtactttttttttttggtctttttgtcttttctagggccaaacccatggcatatggaagttcccaggataggggtccaatcagagctgtagctgccggcctacaccacagcccatagcaacgccagatccaagccgcgtgtggagcctacaccacagctcacggcatcaccggatccttcacccactgagcgaggccagggattgaacccgaaacctcatggttcttagtcagattcgttaaccactgagccacgatgggaactccagaagtttgtaccttttgaccaccttcaacgaggggctatttagggaaacaggttatgttgtcccagtgctgagccctagatcccgagatgcccaaatgttcatcagtaaatatatgtgttttttttttttttttttgccacaccagcagcacgcagaaggttctgggccagagatccaacctgatccacagcaccgacaatgccaaaccttaaccactaggccaccagagaactcctatgtatttttttcttccagtttataattcacctacagcactgaatgagttgtagagcataatgactggacttgcatacgtcatgaaatgattaccacaataagtttagtgagtgagttcccactgtggctcagcagtaacgaacctgactggtatccatgaagatgcgggttggattcctggcctcgctcagtgcgtttaaggatctggcattgctatggctgtggtgtaggcgggcagctgcaggtctgattcaacccctaggctgggaacttccatatgccacagatgcagccttaaaaaacacataaaaataaaaataagtaagtttagtgaacatccattagctcacataaataaaaaattaaatagaaaaaaattttcgttgtgatgagaacttataggatttattctcttaaccactttctttctttctttcttttttttttttttttgtctttttgccatttcttgggccgctcccacgacacatggaggttcccaggttaggggtccaatcagagctatagccgctgacctacgccagagccacagcaactcggacggaatccgagccgagtctgcaacctacaccacagctcatggcaatgccggatccttaacccactgagcaaggccagggatcgaacccacaacctcatggttcctagtcggattcgttaaccactgagccacgacaggaactccagactcttctttttttttttttttttaagggctgaactcgaggcatgtggaggttcccaggccaggggtcggatctgagctgtagctaccggcctataccacagccacagcaacacaggatccgagccacatctgcgacgcacatcatagttcacggcaacactggatccttaacccactgagcaaagccagggattgaacctgcgtcctcatggatgctagtcagattcagttctgctgaacaatgatgggaactccccatgctgactcttaagataacagagagagcctgcctcatcatgatggccagattctgtacttgacatgggtcttgaatggtcagcaactgatctcaaggccctggaatttagtggcttagccttacactggcacctcagcagagggtcccagatcaatcccaggcattctagtaggtgtcctttttttttttttttttggtctttttgccatttcttgggccgctgctgtggcatatggaggttcccaggctaggggtccaattggaactgtagccgccggcctaccccacagtctcagcaacgcgggatccgagccgtgtctgcgacctataccacagctcacggcaatgccggatccttaacccactgagcaaggccaggaatcgaacccgcaacctcatggttcctagtcggattcgttaaccactgagccacgacgggaactcctcttttttctttttaatggctgcacccacaccatatggaagtgccctggccaggggtcaaactggagctgcagctgctggtctacaccacagccacaacaacactggatccaagctgtatctgtgacctactccacagctcgcggcaacgccggatctttaaccaactgagtgagaccagagatggaacccgaatcatcacagagactgtgtggggtcttaatccactggaccacaatgggaactccgagaatatgcctttatggtagggagtctgacgcctgggaaacctttattctggcagggcgtggtttaccgcagtgatcgcctccctctaattgcctgcatcccatccctgtgccgggctccaggtgagctgactccacagagctctcctcacctgccggggcccttgtgacttctctcttctctggtcccccaaccctgctgctcaatcctactagcggactgaaccgaacgaggctgccacctcctcaaggcaaggaccctgggttcttcacattatttgagtccacaaggtaggaccaaaggaaaatttgtggaggacagtgatgctggagatgatctgtgatataatttccagcaagtaaccttcaaggacccagcagccatcttttttttttttccactgtacagcaaagggatcaagttatccttacatgtatacattacaattacattttttcccccaccctttgttctgttgcaacttgagtatctagacatagttctcaatgctattcagcaggatctccttgtaaatctattctaagttgtgtctgataagcccaagctcccgatccctcccactccctccccctaccatcaggcagccacaagtctcttctccaagtccatgattttcttttctgtggagatgttcatttgtgctagatattagattccagttataagtgatatcatatggtatttgtctttgtctttctggctcatttcactcagtatgagagtctctagttccatccatgttgctgcaaatggcattatgtcattctttttaatggctgagtagtattccattgtgtatatataccacatcttcagaatccagttatctgttgatggacatttgggttgtttccatgtcctggctattgtgaatagtgctgcaatgaacatgcgggtgcatgtgtctcttttaagtagagttttgtccagatagatgcccaagagtgggattgtggggtcatatggaagttctatgtatagatttctaaggtatctccacactgttctccatagtggctgtaccagtttacattcccaccaacagtgcaggagggttcccttttctccatagcccctccagcacttgttatttgtggatttattaatgatggccattctgactgatatgaggtggtatctcatggtagttttgatttgcatttttcttataatcagcgatgttgagcattttttcatgtgtttgctggccatctgtatatcttctttggagaaatgtctattcaggtcttttgcccatttttccattgattgattggcttttttgctgttgggttgtataagttgtttatatattctagagattaagcccttgtccattgcatcatttgaaactattttctcccattctgaaagttgtctttttgttttctttttggtttcctttgctgtgcaaaagcttttcagtttgatgaggtcccatgggtttatttttgctctaattcctattgctctgggagactgacctgagaaaatattcatgatgttgatgtcagagagtgttttgcctatgttttcttctaggagtttgtcctgtcatatatttaagtctttcagccattttgagtttatttttgtacatggtgtgagggcgtgttctagtttcattgctttgcatgcagctgtccaggtttcccagcaaccagcagccatctttttgactgaagatacactcttcccagtgagatggaatcagatgatgggagatactatatgtacaaatgcttcccacatagtaaggcatcataacacagtaatttttgtttattcttttttggtcttttttttttttatggccacacacttagcatctggaagttcccaggctagggggcgcatcagagctgcagctgccagcctatgccacagccacagcaatgccagatccttagcccactgagcaaggccagggatccaactcgcatcttcgtggatagcagtctggattgctacctctgagccatgatggaaactccgccgtaatcgttatgaatgaagtctccattgcccacctcagtgactggtccatttctaatgaccctgtacttttattggtacttccagtaacggagtcagacccacctgcctaccctgctccctgggcattacaatgcttatcttatgaggagttcaaatattggtatcccagccaccgcatccgctgacttagatacttgcaaccaggcagctcagcgcttttccaatgcccagataccttaggtggcacattggagatagttcttgaagtagtggagagccaacttgaatttgatctgggcttcggtgttggcccgataactggtgtagttcccctccagggtggccagctctgggtccatcactggtaaatggggctggtgacctatgatcacatgtgggcaggaccccacgagcaggctcccgagcccatcaataaagaactctgccaagagagggagagagcgcgagaaggaaacgtgagcttcaaaccagagacccgggccaatactgcgactctgggaggagggctggggtggggggggacatagcttctattctggggaggttcagtcccatggcaaagccactgagttggaagatcagacagatatcagcagagagacacagattagcagaccccaggactgggaggaatgagaggggaagaggtggggtgctgctcaccagctgcagctaaacagagaaggatgtctggaaaaggaggagcaggaaattcccgtcatggcgtagtggttaatgaatccgactaggaaccatgaggttgtgggttcggtccctggcctcgttcagtgggttaaggatctggcgctgccctgagctgtggtgtaggtcacagaggcagctcagatcccgtgttgctgtggctctggcataggccgggagcaaaagctccaattcgacccctagcctgggaacctccacatgccatgggtgcagccctaaaaaggcaaaaaaaaaaaaaaaaaaaaaaaaaaaggcaaaaaaaaggaggagcagcagcaagacaaggaaagagggaaggggcagagctgcagggagaggaggtagaagggtgtctcggagaagcaggaatagcctatgggagacacgaaggtggagggaggcaagagagaccaagagctccctagtttggggagaaggggctgcttccctgagcagcagggccccgccctccctcagaaagagacttctgaagccagcgcacagcccagctcgcttcttgcccttccagcctccccacctgagtgagccactcgctgcagccgggggtcgaagccaattctttggagtcgctctgtgtgagccaggaagaagttgacaacaccactggtcaccacgcagtcggggaagccatccacgggccggaaaaatcctggctgctggtggagacagtcgccattcttcccctgctccagcaacagcttgaactggaatgtgttttcaatcacgctgccacctacctagccagcgggaggagaaatctgttagagaacagactccatatccaaggagcctgtgccaggaagccttactggactgaacctcagtcacgacaagaattgcactccctggagttcccgttgtggctcagtggttaacgaatctgactaggaaccatgtggtttcgggttcgatccctggcctccctcagtgggtgaaggatccggcgttgctgtgagctgtggtgtaggtcgcagacgtggctcgtgagctgtggcataggctggtggctacagctccaattggacccctagcctgggaacctccatatgctgcgggagtgacctaagaaatggcgaaaagaccaaaaaaaaaaaggtaataataataataaaataaaataaaataaaaaagaaaaagaattgtactccctgtcttatctacccttcatgttacacttccgccaagtccaaagggcagcaaagtttctgctgcacttaccctccagcaagctcactctttccagagggccactccctcccctcccttctgctacaaggatccaggaggatcgaggatgggggatcgcgtttgggtgcaggtgagaggcagccagcgtgcagccgtccctacgtggacttcctgagcaagcctttgtctcaagttgtctccctcccattctctgcccctggctcacttctctgcgccgtctgtccacacaccacacactcctgggagctcgcagctttgtgtgagcccgagcacagcaggacaagcaagtacatctattcctgaaccatcataatcacctagggaggcagagcagaatctgccagttgccccccaccccctcgcctgttctttccttcctcctcttaggaaatgagccccctgaggtgttttttggtttttgtttttcctttttcagctgcccctgcagttcccaggccggggatggaatccaagccagagctgcacccaccccacccccacgcagcaacgctggatacttaatttaacccacggcacaggactggggattgaatgggcacctccacagagacaaactggatccttaacccccatgccacagtgagaactccaaactccaaaccctctgagatttaagtggactaaattaagcgacaatgatcctacgaaagatgaaatttccccacttctctggagttcccaatgtggctcagcggtaatgaacctgaccagtatccatgtggacgtgggttcactccctggcctcctcgagtgggttaaggatccggcattgccgtaagctgtggtgtaggtcacaaaatcagctcaggtcccatgttgctatggctgtggtatagacgggcagctgcagctccaacgggacccctaggttgggaacttccatgtgccctacaaagaagaagggaggaaggaagggaaagagggagggagggaaagaggagagagagggagggaggaaggaaggaaggcagggagaaatggcccacagcatatggcttgaatcccagctgcagctgcagcaatgccaaatcctttaacccgctggactgaaccagcacctctgcagcaacccgaaatgctgcagtcgggttcttaacccactgtgtcacagtgggaactccctgaaaggatgtgatttagaacagatgtctccaatttttaaaaagaccacattcttctcatcttttcctttttttttttttttttttttggcttcttaaggttgaacccacggcatagggggttagtggttagtttccaggctaggagtcaaattggacccacagctgttggcctacaccacagccacagcaacgccagatccaagcctcgtctgtgacctataccatagctcccagcaatgccagatccctgacccactgaacaaggccagggatcgaacccacatcctcatggatactagtcagattcatttctgctgcgccacgaagggaactcccaagaccacattcttaaaagaaaactgttgtcttctactccctctctccccctttcttctgaccgtgcagctgagggccacaaagatggatgaacaacagggaaggaagctggaccaggatgaccctggaaagagacaatagggccagcttgcattctctctttttttttttttttttttttttttggctttttgctaattcttgggccgctccagcagcatatggaggttcccaggctaggggtccaatcggagctgtagccgccggcctacgccagagccacagcaacgcgggatccgagccgcgtctgcaacccacaccacagcccacagcaacgccggatcgttaacccactgagcaagggcagggaccgaacccgcaacctcctggttcctagtcggattcgttaaccactgcgccacgacaagaactccccagcttgcattcttacacgggtaggaactgcaccttttttgtcatttatgctattgtgactgggtctctagaagagtagcaaagagacatcttcgtcaatccagatgttttgggggactgtccacctggaataagagataactgtggtcacggtgctacttatccactttctttccaggccgggatagaaccagcaccacagcagtgacaatgctggatccttaaccctatgagccaccagggaactcccatctttctttttccaaacagctttattgagatatctttgatatattaaaactgtatgaaggagttcctgtcgtgtctcaatggttaacaaatccaactaggaaccatgaggttgcggattcgatccctggccttgctcagtgggttcaggatccagcatttttgtgagctgtgatgtaggttgcagacgcggctcggatcctgcgctgctgtgtctctggcgtaagccggtggctgcagctccgattggacccctagcctgagaacttccatatgccgcgggagcggctcaagaaaatggcaaaaagacaaaaagacaaaaaacaaaacaaaacaaaacaaaacaaaacaaaaaactgtatgtattgaaggtgtacagcttgatttttttttttttttttggtctgtggcatgtagtggcttgatgcaggatctcaattcccagaccagggactgaacctgggccacagtggggaaagcaccaaatcctaactactacaccaccagggaactccctgcagcttgatgttttgatatatgtagacactgtgaaaagatcaccacacgcaagctaattaatgaattcatcacctctacacagtgtgggtatcttcacaaatttcaagaacgcaatgcagtattattaactattcatcaccttttttcccccttttccatgtgtaaattaacttttgatatttgtggggttttttgttctgttttgttttgtctttttagggctgcacctgcagcatatgaaagttcccaggttagcagtccaattggagctgcagctgccagtctacgccacagtcactgccacagccacagaaatgccagatctgagccacgtctgggacacacaccacagcttatgcaacaccagacccttaacccactgagcaaggccacggattgagcccacatcctcatggacactagtcgggttcattactgctaagccacgacgggaactcctgtgttaattttttattgtcattaaggccacgtgtgcttttatagctttgtgccattttcatttttgtgatggtgtgtgacaaaaccagagcagcactcacattcctctccaactctcaccagtccagagaggaagttggaagtgatgcatacaaagaaaaccacagctttcaaaagatacacgcaccccaacgttcacggcagcactattcacaatagccaagacgtggaaacaacctaaatgtccatcaacagatgagtggtgtacacacacacacacacacacacacacacacaatggaatattactccctcatgaaaagagtgcaataatgccatttgcagcaacgcagatggacctagagattatcatactgaatgaattcagagaaagacggatatcatatgatatcccacatatgtggattcaaaagagatacaaatgaacttatttaccaaagagaaacagactcatagatttagaaaacaaccttatggctaccaaaggggaaaggtggctggcgtggggagggggtggagggataaattaggaaattgggattaatatatacatactaccatatataaaatagataggagttcccattgtggctcagtgagttatgaacccaactgtgatccatgaggatgcaggttcaatccctggctttgctcagtgggttaaggatccggtgttgctgtgacctgtggtgtaggtcacagatgcagctcaggtctgatgctgctgtggctgtggtgtaggccagcagctacagctccgatttgacccctaacctgggaacctccatatgcctcggatgcagccccaaaaagaccaaaaaaaaaaaaaaaaagataactgacaaggacctactgtatggcaaagggaagtacacgcaattattctgtaatttcctacgtgagggaaggaatctgtaaaagaatgggtatagctgaatcactttgctgtacacttgaaactgatacaccatggtaaatcaactctactccaatagaaaatacaaattagggttttataaattttataaaaataaaataaaacctaggccacctggtggcctagaggttaaggatccaacattctcactgctgtggcacaggcgggatcaggctggatccctggcctgggaacttctgcatgacataggtgtggccaagcaaaaaaaaaaaattcaattaaaaaaaatgactgggagttcccattgtggctcagtgattaagaaacccaactagtaaccatgaggttgcaggtttgatccctggcctcactcagtgggttaaggatctggccggcattgctgtaaagtgtggtgtaggccagcagttacagttccaactggacctctagcctgggaacctccagatggggcaagtgtggcactaaaaagacagaagacaaaaaaaaaaaagattgaaaaaagtgcctaaacacacttttttcttttgccatttcttgagctgctccctcagcatatggaggttcccaggctaggggtccagtcggagctatagccgctggcctatgccagagccacaacaacgggcaattcagccgcatctgcaaactacaccacagctcacagcaatgccggatcctgaacccactgagcaaggccagggatcgaacccacaacctcatggttcctactcggattcgttaaccactgagccacgacgggaactccacaacacactttaaggacagaacaacggtgagtctggggagtggggttggtgtgatttgttcaaagaaaagtaagaatggaggcagaagcagaatccgagggtctcatttccgtgcgagagtctcaatcccagagctgctctgcatcacctcctgcacggcccttccccttccgcctccctcttccccccccccccacccccgtcccttttcctctcctctttcctcctgtcctttcctctctgccctctcctccccctccccctctggctcgtcagatggcaatggggtagaactggcagcgctcagctcacttaccacgtccagttccgttttctctaggacgtccaccagcgcctcgatcctggtcttgctgttgaagatgaagtcatcgtccacccagagcacatatttggtggtgacctgagatatggccaggttcctgccagcaaaccagccctgcgagggcagggaggttagacccgtggttgcccgccccgctgcctcctagcatcacctgggggctttctcagctcccaagggtcaggctgccccccagacagtggctgagaacctctgggctaaagggagtccatgtctcagagaccctggaagaaggagagggactctctggagacgagaaagtccctccttggccctgtggcttgagggatggatgcaagtccctttacacctgacagtctttgtggccctttcgccctgtgttgcctggaagatgctggagggtggggctctctggaaggggtaacatccacttcctcccggtgtgctcgagggaaggtgtggggcgcggagagagacaccccagcaagggtgaaatcatgacagaggtttctctgctgtgggacctgcgtatcaggaaaccttagagcgtcagacaccgccagtcgcttacaaggacctccatcaatttccacaccaagcgtgaggaaagacagattacccaccccgtcactgcaggaaagggagagtgacctgatttctccgggaatttggaggcagccaggggactcagaggagtccccaccccccgccccccaaggatcctgctgccgtgggagggtcccccccaaccccgaagcagccccaaccagggtaccacttgaccctggggccctctggtcccaaggtgcccgtgtctccccctctgggaggaatataccttcccaaatggcatggtgtaatactccacgtggctgtcagtgattttcaggggctccttgctgtcatcggccacgatcaccgtcaggtctgggtagtactcacgaacactccggagcatggtcatgagcttgtggggacggaggaaggttttggtggcaatggtcaccaggtctcggagcttcctctctgggcaagaaagggtaggtgtcagagctctgtcttcaagaatcctcactgacgtgcattgctctggaggtttctttacacggcgctgtctcgagtgtttgtggacctcatgccttttgttcacagttgatgttagttggatcagaaaatacattttattattattattttgtctttttgtctttttagggccgcacctgcagcatatggagggtcccaggctaggggtcagctcagagctacagctgccggcctacaccacagccacaccaacacaggatccgagcctcatctacaccacagctcacggcaatgccggatccctaacccactgagcgaggccagggatcaaacctgcatcctcatggatgctagttagattcgtttccgctgagccatggtgggaactccatgagtcagattctcaacccactgagccacaacgcgaactcccaatttgtttaaatggtttctgtcttctagagtgtctccctttttttttggttttttttttgttttttgcttgtttgtttgttcttttcttagtagctgcacctgcagcatatgtaggttcccaggctcccaggctcccagttgaatcagagccgcagctgcaggcctatacctcagccacatcagatctgagccgcatctttgacccacatcacagctggcagctatgcagatactgaacccactaagtgaggccaggggttgaacctgcatcctcacagacaccatgtcaggttcttcacccactgagccacaacgggaactcctctcttctggttctgttggctccagtctgctgtttccttctgtcgagtgggatgcttcaagttctgcctgcctatctgcacttggtttgcaaccggctttcatgctgttactgggaattgagacgcatagagtttcacccatcaagggattcaatatgaccagtcgtgaggcccaggaagaggggaaaagatttaaagacctgagacctgccctgtcacagctgcaatcctacagagagacgtgcctggcctggtttgtttttttttttttgctttttttagggccgcacccacggcatatggaggttcccaggctaggggtcgcattgtagctacagctgctggccacagccacagccacagccacagcgatgccagatccgagccgagtctgcagcctataccacagctcatagcaacgccggatcctcaacccactgagcaaagccaggaatcgaacctgaaacctcatggacactggtagggttcgttaacccctaagccacgacgggaactccttgtggttcttatccatgttcttttcttactgattcataagtcctctgaagtaaaattagacctttgactttcgtgtgtgtggttatttttccccagtttgtcttttgtcatttgactttgcatatggtaggcttccgtcattaaaaacattaaaaattgttatataatttatgtttttagtctttttccttttagtctttttcctaggttttgtgtcttatttagaaaagtcatactttacacagttatttttaaactccaggctgattcctagtacttaaaacaattagatatttgctctacctggactgtaccttggtgtgagctatgagatggattcagcttgttattttcacacagctacacagttatctaacacaatctcttgaacaatccatctttttcccctttaatttgaaaaactaccttgatcacacggtaaaattccaagatgtctatttctgggtttcttttcttttctttttctttttttttttttgtcttttctagggctacacccgcggcacatggaggttcccaggctaggggtcgaattggagctgcagctgccagcctatgccagagccatagcaacatgggatccaagccgcgtctgtgacctacaccacagctcatggcaatgccggatccttaacccactgagcaaggccagggaccgaacccgcaacctcatggttcctagtcggattagttcgttaaccactgcgccatgacaagaatgcctaggtatctaatttgattccactgacatagctcttcgtggtccaataccattctatttttataattattacttattaaaatgtcataaatcattagatttttttcaaaataaattcaaccgtacaataagttaaacgtaatgaagcagtattaaaagcgtattctagcatttttttcctccaaaaaagcttgttggagttctctggtggcctagtggactaaggatccagtgttgtcactgctgtggcttgggtcactgctgtggcacaggttccatccaaggcctggaaacttccactctgcgggcacaaccaaaaaaaaaaaaaaagcttgttaacaggactcctattggagtttttatttcatcgagtctcctcctccatctcagaggggagcccttctgcatctcacccaatagtctccagggacccaccatggagccccagggacaagggtcttacctggtccagggtcatataacttgggcatgacaggatagcggatggtcactggaaacttggccactgaggacttggactccagactcactggagggagaaatcaggtcagggctggtgcacggtatctgggtcactccccacaaggccggggaagcccacgcgatgggggagtgaaggactgaggaccccacagagtctatggcattctggctcctaccctgctgtgtgttccggaagcaacctgctgaccgcctctgaaacgcacatgtctgcccccgtgagactctgtcgggtgaagtgggcttggaatcagaggggtagattaagtttgactctgcatctataatttgaaataccttgggtaagtcacatcacctccacctccacctccaaaaccagggtaacactaccagcccagttcacctcacagtgccttttttgttttttttttttttgaagggctgcaggtgcagcatatggaggttcccaggctaggggtcaaatcagagctgtagctgccggcctacaccacagccacagccacagccacatgggatccgagccacgtctacaacctacaccagtgcctggcaacaccagatacttaactcacgagtgaggccagggattgaacctgcatcgtcatggatcccagtcaggctcgtttctgctgagccacaatgggaagccccttcatagggtcattctgtggtaagacatgtttaaaaatcccaaggtacagagaactctctctctagcttatgctcatggaaaatctgcctcacattcactggggtcctgggaaagcctcctgtgtatctggtcaaagcagaaaaaggtaaatgtcttttttttttttttttttttctttttacggctgcacctgctgcatatggaagttcccggactagggctcaaattggagctgcagctgccggcctacgccacagccacagccacagccaatggaatcccagccacatctgcgaattatgccgcagcgaggcctgggagcaaacctgcatcctcatggattctagttaggttcttaatccactgagccacaagaactccggaaaagggtaatttatttatgtatgtatttatttatttttgtctttttctttttagggctgcacccgtggcatatggaggttcccaggctaggagtccagctggagctatagccaccagactacaccacagccacagcagctcagaatctgagccacttctgcagcctacaccacggctcacgcaatgccggacccttaacgccctgagcaaggccatggatcaaacccgtgtcctcatggatactagttgggttcgttaaccactgagccacaatgggaactcccggaaaagggttttaattcatccagaaagtaagtggggctgccctgagggtggcaggaattggtctcccatgaattctgggagtaagagtcgggtttgggatgggaggggaggaggaagacaaagccactgcccttgggactgacagctcccccacatccctctttcccgtaatgctcaggacaagccactgacacgtggactgtgttctcctctactgcagctgaaaccttcagctttttctttttcttttctttcctttgctttttagggccgcacccgcagcatatggaagttcccaggctaggaatcgaataggagccgcagctgccagcctacaccacagccacagcaacgcaggatgggatctgagccacgtctgcgacctacaccacagctcacggcaacgccggatccccgacccaccggtgaggccagggatcgaaccgccaacctcgtgaatactggtcagattcatttccactgcaccacaaccggaacagggaaccttcagctttgatcactgatgagaacgggagcagaaggggatggtttccaggtgcagagcatgaatgatctgtcctcatgtacagacaagcaggcatttcactgtctttctttcgggtccctccacgggctcaatggcaacacggggatagtaccaggtacactaagtgggaaattagaaacaggagccagggaagcaggcttcctggagaaggaagaccttgagagccgggggcgggggcagtggtggtgtttatggggtccctcagcattttgccatccgaggacggactcacccacatccactctgtggaggtggtactctgtgctcgtgtatgtcacatgctggaggatgaaattcaaaagctcccggctactggtcaaaatgttcagctgcttctggcctctgcccttcaccacattgtctgggacgtcagcaagggtgttcagtgtccccagagaagctgtcagggtgacctaggataaaggaggtagaaagcctaaatgcagagaggcacatacccaggatggccagcagggggcagcatgcataagggtgtgaggagaagaacgcttcatgctcccgaaagctagggtctggcctctgatggagtgtctgccccagccccaaaagcctaggacctaggacctggtgtgttcaagggccatttctgaaacattcttaactcttggcatgcagagttaagtggcatccattcttaaagatttcttctggagttcctgttgtggctcagtgataacgaatccgactaggaaccatgaggttgcaggttcgatccctggccttgctcagtggattaaggacccagtgttgcttcgagctgtggtgtaggttgtagatgcggcttggatccggtgtggctgtggctctggcgtaggctggcagctacagctctgattggacccctagcctgggaaactccatgtgccgctggatgcggccctaaaaagacaaaagacaaaaaaaaagaaagaaagaaagaaagaaaaagaaaactgctgaaaacatttcagtcaacagatcttttcttttcttttctttctttttagggccagacctgaagcacatggaagttcccaggctaggggtccaatcagagctacagcatctttgtctgccccatctttgtctctctgtcaaacgctgagaccagccaccatctcagggaaaagcgcatgggcagtgagccaaggacaggatgctaagtgcaaagtggggctgggaaggggactcttgcctcatagatgggagcatcaggtccttcaaaccggaggcctggaggtcacaggaaaaaggagaaaggaaaaaaaaaaaaaaaaacatttgagaggatgccaagagttccctgatgctctcagctccctggccaattcctacacatccctccagagccccttcaagtgtcacctatccagggtgtttgcagaccgctcgcctccccactagagcttgctagatggtgtccaacggacctctgcaaactccagcaaaccaaagcctctgatgccctcccctagtttgggttttttttttttttttttttgtcttgttgttgttgggttttgggggggggttgggggctttttagggccacaccctctgcataaggaagttcccaggccacgggttgaatcagagctgcagctgctggcctacgtcacaatgacagcaatacagattgtcagctgagtctgcgacctacaccacagctcacagcaacaccggatccctgccccactgagcgaggccagggatacaacccaaaacctcatggtgcctagttggatttgtttccactgcaccaccacaggaacccctaaatggtaaactttatgttacatatattttacacactagaaagagaattatccaaaatggcaaatcattttttaaatgagtacttaaaaacacgagcaactcagagttcctgtcatggcgcagtggaaacgaatccaactaagaaccatgaggttgtgggttcgatccctggcctcactcaatgggtaaaggatccagcattgctgtgcgctgtggtgtaggtcgcagacgcagctcggatctggtgttgctggggctctgctgtaggccagcagctacaactccgatttgacccctagcctgggaacctccaggtgctaaaaagacaaacgacaaaaacaaaaaacaaaaaacagaacaaaacaaaaaaaacccaaaacaccagcaactcatctcaaatgtttttactttaaaatctatctctgttcttatgactaatgcaaattctcactcaaacacatcctccttctgtggcctaaacttatttgggaaattggcaaaataacatttacctcacagggatgtatgctggacgagaggtgtgtgtaaaaaccactcgtggaggagctgtaacggatagaaatattctttccatatgcagtccctggagatgggctgaggctttgcttgctcccttgatgctggcagacaccaaaaagccaataatggcctaagattcctcgaggcacccagatctccgtcctctcctatacgatccaagatgcccagggaggcaacagctcctaagtgccattcccagtggtggaaacagtgagaataacatcaaatgaaaccatgtccagcttcatggattgtgctgggtatccgggaaggattcagcggataactgctcccttctgctcccttctttgcttcagaaggactacgagagctgcctgggtcctgtccgggtggagatgcacctacctgggatggggatggtgtgtagaggcatcacttccaccccgtggaccgggtacccaaaggggaggttgggctgagccagcaggggcggtgggcgagggagcccttctctgcagggaaacaaaaccatcagcagctgccttgatacctgtccctgactagctcttttttgggggggaggggggtgcaaccacacccacggcatagacgttcccaggccagggatctcacccaccccacggcagcgacctgagccaatgcagtgaccatgccagatcctccttaacgtgctgagccacaagggaacttccactgctcccactggtttgttcttttttttttctttcgtttttggccttcccaggccagggatcagacctgagctgtggctgcgacctaagctgcagctgcagcaaaagatctttaacccactgtgctaggccaggggttgaacctgcatccccgtgctccccagacacagctgattccactgtaccacagcaggagctcctcactgtcgccactggctagttctttttctttttttctttctttttttttgcttttttagagccacttcccgcggcatatggaggttcccaggctaggggtccaatcagagctgtagctgccggcctacgccacagccacagcaacgcgggatttgagccgcgtctgcgacccacaccacggctcacagcaatgctggatcctgaacccactgagcaaggccagggatcgaacccacatcctcatggatactagtcaggtttgttaaccactgagccacgacaggaactgctggctagctcttaaaggggtatctgtgcccagagctttgggctgcaaagggggagaaatccaaagtaaatcgtcggattgtcatgcattctctcctcttctttattcctgctcctccctccagcctcgaattccacaaagaaactgaggcagattacaacaacacacattaaaaataaaaatcacggagttccttttgtggctcagccggttaagaatccaatgcagcattcttgaagttgcgggttcaatccctggcctcgctcagagggttaaggatccagcgttgccctgagctgtggtgtaggtcgcagacgcggctcggatcccacatggctgtggctgtggctgtggggtaggctggcttctgtagctccgattggacccctagcctgggaacctccatgtgcctcgggtgtggccctaaaaagtaaataaataaataaaatgaaacataacataaagagaacaaaggtaacacctgctcacactcaccacgttcgaattattttaatacattttcaattgctggttttcaatgtgagccattttaaataaatctttacatgcaatattaaaaaatattaaaatattatctctactcttgaggttatttgcatcaatctccctgtggatggagatattatataaccggcatgcaatgatatctcgtgggagacttgaaatcagccacagtgtgatttcttgtagggttgagtttttttttaatttttgaactttttactaaagcagggttgatttacaatgttgtgtacagtgtgattattaaaccgtggaaattggcaaacactacaagccactaccaaaagcccatggttaaatattaccaccactattcatatttctccctcaacgtataaacacatctacccacacttatacacacaactatcccctcctcttttaaaaacacaaatgtggagttcccattgtggcagagtggaaatgaatctgactaggatccatgaggatgcagattcgatccctggcctcactcagtggggtaaggatccagcgttaccgtgagctgtggcgtaggtcgcagacgcggctcagatctggcattgctgtggctctggcgtaggcaagagtctacagctccaatcagactcctagcctgggaacctccatgtgccatgggaagtggccctagaaaaggcaaaataccaaaaaaaaaaaaaaaaaaaaaaaaaaaagagggcattccctcccccctccttggagccacaccctcgggaatgagtagagagcttccgctccatctcagggcgcaagagccctcagcatctgcaatacctcctctgaaagtgttcgagctcagcctgtctcctcaggttcactgcggggaggtcttgcgggtcgtaggcatcctccaagttatagctttcctgatgcccgaaggcgtcacattggcactggtttttcgggaacagcctaaaataagacaaggtcaaagatcacagattgggaaagtgggctggtaggtgagggggagccgcaagctcggtccggtgtattttttttttttttttaactttttattttctctttttttgtctttttagggccgcaaggttccgaggctggggtctcatcggagccgtagccaccggcctacgccagagccacagcaacgcaggatccgagccgcatctgcgacctacaccacagctcatagcaatgcttgatccttaacccactgggcaaggtcagggatcgaaccctcaacctcatggttcctattcggattcatctccgcggagccatgatgggaactcccaatccagtgtgtttttccccctaggctttcccatacctagcgccagggttgggttgagaccctggaatcacagcagcggccgctcccaaagacacagggaaggaagggaagagaggaaggaaggagggcgagaaggccccctctctggaatcaaagtcctttatttattattattattattatttgctttgtagggctgcacccgcagcatatgcaggttcccaggctaggggtccaatcggagctacagctgccaacctacaccacagccacagcaagatcagatccaagcggcgtctgggacctacaccacagttcacggcaaccccgatccttaacccatggagcgaggccagggatcaaacccacaacctcatgcttcctagccagattcgtttctgcagcgacatgacaggaactccccaaactcctttaaacttgagagtcacaggaatctcagaggcattgcagccccacccaccagatgaaaaggccagagggccagaaaggccacatctttcctataattttgtttagttttgggggttttaatgtgtttttgttttttagggccacatctgcagcatatggaagttctcaggctagcggtggaatcggagctacagctgccggcctacaccacagccacagaaacatgggatctgagctgcgtcttcaatctacaccacagctcaccgcaaccctggatccccgactcactgagcgaagccaaggatcaaatctgcgcatcctcatggatcctagttgggtttgtcaccactgagccacaacgggaactcctcctacagttttggttaaataggccctccaaagtcctaaagaactttgctgggtgctatagaggctatgcccagcagaccaagcccctttctagtcccgccgtttgcagtcaaatgctctacccctgagccatactcccaccaggtcccgcagtcaggattcacattcccaatcagcacaggtgcagaaaggtagggaactggctgtaaagtgggcataagaggacacagtaggagttcccgtcgtggcgcagtggttaaccaatccgactaggaaccatgaggttgagggttcgatccctggccttgctcagtgggttaaggagccagtgttgctgcgagctgtggtgtaggttgcagatgtggctcggatcctgcgttgctgtggctctggcgtaggccggtggctacagctccgatgggacccctagcctgggaacctccatatgctgcgagaagggcccaagaaatagcaaaaagacaaaaaaaaaaaaaaaaaaagaaaaaagggcacagtaaagccacaggaggagccagggaagtgtcagtgcaaagtggtattcttgccatctcacccgttttcaccgtagaaatcgggtttctcaggtagaagcttcagcgtctgcgcatccagggtgggggacgggatgggtgagttgaggagactgaagtctgtatcgaggaacacgctttggaacataaagagtccaacgctcaggaccaaaagcaccatcaatatcttgaggatcgacagacatctagggctgttgggacacaagagagcaaacgctgttaaaatcttttctgagtatgttaaaaaagatttcattgtgcgacatagatgggaatagcaacttgagcaaaaatgcaagtcaaacctgttttgtacactacgtatcaaaattgatttcttcccaaggcaaaagagaaagaaaagcaaaaataaacctaagcaaactgacaagcttttgcacagcaaaggaaaccataaaataacccaaaaagatcctgctgggatccactgggaacgatgtctggtcacttgcgatggagcatgatcatgtgagaaaaaagaatgtatacatgtgtgtgtgactgggtcaccttgctgtgcagtagaaaattgacagaacactgcaaaccagctataatgggaatgataaaaatcatttaaaaaactgatttcagataaatagaaaagtaaagaatcaaatctgcagagagttccctggtggctcattgggttaaggatctggtgtggtcactgctgtggctctggtcaccaccgcggcatgacctccatccctagcccaggaacttctgcatacgtgggcatggccaaaaaactatactcagtggaaaatgtgaagtttttcaaatacgcacttctgatcacaagacctaaaattaataaatgaagcaataaaataagagatttgaaaatggacaacaaaatgaacctacgaaaagcagaaacaagattttagagatagccaaatagaaagtggtgaatttaaaaaaaaaaaaactaaaatggaatcatcgttaaatctaagcacagagtagacaactggttttttcttttatttttttaaaattttatggccacagccatggcctgtggaagttcccaggccaaggactgaatccaatccatagcttcaacctacacctttaaccaccgcactgggcccagggatcaaacctgcacctctccagtgacctgagccactgcagtcggattcttaacccactgtgccagggtgggaattccagacaactttataacctccttgctctaagactttcctcctgacccagaagtgacacctacaaacgagtctggttatatcacatgacgctcccctggtcctggctgagtaagcggatgttcacctcatccgaatggggctaatcagccagaatttccttcccagaaatggggaaccagagatattgttcggctaatcctaatcccctgaactgagaatagaggggaggaaagaagagagagaagacagaaggtgagagaaacaaaagaagcctagaaggacttcccattgtggctcagtgggttaagaccatgaccagtgtccctaaggatgcaggttcaatccccacccttgctctggcattgccacaaactggtggcagatgcggcttggatctggcgttgctgtgcctggggcataggctggcatctgtggatccaattcgacccctagcctgggaacttccatgtgacacaggtgcggccctaaaaaaaaatcgtttttaatttaaaattttgggggcagtgtctttaaggcattagtctgctatggctccctttgcctgacaaagcaataaagctatctttttctccttcacctgctcctccccccaaaaaagagttcccattgtgccgcagcagaaacgaatacaactagtaaccatgaggtttcacgttcgatccctggccttgctgggtgggttatggatccagcattgccatgagctgtggtgtaggttgcagatgtggctcggatcctgcattgctgtggctgtggtgtaggcctagccttggaacctccgtataccatgggtatggcactaaaagccaaaaaaaaaaaaaaaaaaaaaaaaaaaaaatttaatttaatttttaaaattaaaaaatttttaatttagtttttttaacttaaaaaaatttttttaaatagagaagcctagatcctgaatacctagatgaaagggatgactttctacaaaaacgcaaatgaataatgtattggggaaataaaataaacaaataaacaaataaataaaagaattcccactgaagcaccgcccccccaaaaaaaaacccacaaaagacttaaacagacctgtaaaaatttaaaaaaaaaaatcaaggagttcctttcatgcctcaggggttaatgaattcaactatgaaccatgaggtttcgggttcaatccctggccttgctcagtgggttagggatccagcgttgccgtgagctgtggctctggcgtaggctgacagctgtagctccaattagacccctagcctgggaacatccatatgccactggttcgaccctacaaaagcccaaaaaaaaaaaaaaaaaaaaaaaatccaggaatttatcaaaggtctatgtacttttcaaagtcccaaatccacacttcacaagtaactccagactggtttgtaagaaaccagctttgcagtgatgcaaatataggtactgaccaataacgatgtaaatacgccaaacaaatattaaccagtgggacacaacagtatcttaaatgaatgagtcaccgttaacgaatgctgttcttggagttcccgtcatggctcagcagatacgaatctgactagtatccatgaggacacaggctccatccctggccttgctcagtgggtcagggctctggaattgctgtggctgtggtgtaggtcacagacgtggctcagatcccgcattgctgtggctgtggtgtaggccggcagctgtagctccgattccacccctagcctgggaacctccatgtgccgcaggtgcggccctaaaaagacaaaaacaaaagcatgttccttctaggagagcaaggataactcagtgccactgtggggcaaaaccacaccgacgccatgctgtcagctcatcttaggcccacagtctcatctgctccccctccttattaaaaaaaaaaaaaaaaaaaaagaatgatcacatcctaagttcctaacacaattttcagactatcagatagaaacaaatcactgacaacctgggtggggggcagcatttgggggaagtgagtgtggtcttggcctttttgagggttgggtttgtttccttttgctattaggtactaaaacttaaaattgcatcacttagtgaaaacagaacaaaaatagggtcggactttctctgtggctcaacaggttaaagacccagtgttgtcactgcagtggccctggtcgttgctgtgccatgggttccattcctggcctgagaacttctgtatgcctcgggcgtggccaaaaaaaacccaaacaaaaacaaaaacagaaacatgagttcctgtcgtggcgcagtggttaacgaatccaactaggaaccatgaggttgtaggttcgatccctagcctcgctcagtgagttaagggtctagcgttgccatgagctgtggtgtaggtcacagacacagctcagatctggccttgctgtggctctgccgtaggccagtggccacagctctgtttcaacacctaacctgggaacctccatgtgcggtgcattcagccttaaagagaaaagaaaaaaacaaacaaacaaacaaaaaaaaacaatagtgaggaaaagtggcatcattttacctttttgcctatttaatgtttagcttaatagataaaatgaaccatctgttaggacaggttgtttcgctgaagaatatgaagaaaatacaaccccacacaggtatgtcaccagaaaagggagaaacactttaattgctttttcaatattgtagatatttatctttgatactacaccaaaaatcaagaagttagtagcaggttattgttttgttttgttttgcctgtggcatgcattagctcgatgtgggattttttttttttttttttggctttttttttggccttttgccatttctagggctgctcccagggcatatggaggttcctaggctaggggtccaattggagctgtagccaccagcctatgccagagccacaggaaacggggggagttgagccaggtctgctcaccttacgccacagctcacagtaatgctggatccttaatccatctgacccaggccagggatcgaaccctcaacctcatggctcctagtcaaattcattaacctctgagccacgacgggaactcctcaatgtgggatttcagttcccagtccagagactgaacctaggccacagaggaaaaaagcgtgaacctgaacccttagtagctagggaacttccaagaagtggtactttcttaaaaagttagttaagtgtggactctgaaaccatatcagtgaaaaaaaaatttttttgctttttttttttaggaccccacctggtgcatatggaagttcccaggctaggggtggaatgagagctacagctgctggcctacaccacagccatagcaacgccggatcctaaacccaccaagcaagggaacaaatagagggagtttccactgcgcacaatgggatcggtggcatcactgcagcgccagggacacaggtttgatccctgacagcataggttgcaactgtggctcagatctgatccctggcccaggaactccatatgccactggcacggcccctccaccctgccaaaaagagtttggaggcgttccctggtggttcagtggttatggatctacactctcaccactgtggcccaggttcaatccctggtctgggaactgagatcccacatcaagccgctgcacaccttgcccaaaaaacagggttttttaacctttttttttttaaactgttattccccaatgcgatttttttcccctactgtacagtatggtgacccagttacacatacatgtacacattctgttttctcacattatcatgctccatcataagtgactagacagagtttctttccttttttctttttttctttattttttaattacttccccaatacaatttgttaaaagggttttttaatcctgataataaacacataaaatttagtaccttggagttcccgttgaggctcagcagaaacaaacctgactggtatccatgaggatgcaggttcaatccctggcctcactcagtgggttaacgatcccgcatttgccatgagctgcggtgtaggtcgcagatgcagctcaaatctggcattgctgtggctgtggtgtaggctggcagctatagctccgatttgacccctagcctgggaacctccatatgccataggtgtggccctcaataaaacaaagaaagaaagaaagaaagaaagaaggaaggaaggaaggaaggaaaggaaggaagaagggaaggaaaggaaggaaaggaagaaagaaaaaatttatcaccttaactacttctaagtgtacatatactttcataatgtagattgttcatgtcgttttagaacggatctccagaacttttttctgcttttttctttgcttatatttttgcatgcaactatttttatccattttttctgattatgaaatttttatcttttacccattgaagaaaaaaaaagttcctctttacaaaaacaaaacaaaacaaaacaaatatatgtaggagaaatgatagaattagaaaaatcaccactttgctaccaacaatgtaataaatgattctggccaggattgtccatcttttttttttttttttcctcgtttttttgcaatttcttgggccactcctgcggcatatggaggttccaaggccaggggtccaatccgagctgtagccgccagcctatgccagagccacagcaacgagggatccaagccgcgtctgcaacctacaccacagctcatggcaacgccggatcgttaacccactgagcaaggccagggatcgaacctacaacctcatggttcctagttggattcgttaaccactgagccacaatgggaactccaggattgtccatctgttctaaaacatttgccaggtgcaggattttgttttgttttgttctgctttttgtgtttttcttcttctttttcttttttctttttctttttttttttttcttttttgtctttttagtgctgcacccacagcatatggaagttcccaggctaggggtctaaccacagctgcagctgccagcctacgccacaacagcaacagcaacgttggatccaagctgtgcctccaacctacaccccagctcacggcaatgccagatccttaacccgctgagcgaggccagggatcaagcctgcatcatcatggatactagtcgggttcattagccactgagccacgacaggaactcctggaggcaggatattgaatggtgccattccggagaacacttactacttacaaagagataaaaacacatctttgcaatgaaaggatcatgcatcactaccttaaccacatggtcaaataaacatccctaatagtgaggcagcctgaccaactgtcctccggatatgatgataggaagcacacagatcatttaaaggagtattactgccaaaatatttaaccgaaatgtaatcaaggatcagagacctcactgccaatttataggaaaaaacaggggataaaaatttagtaacaccatcaagaacaatagacaaatcagggacatcagaatgttttctgcaagacaacaggcctgaactcttgacaaaggaaaaaaagtgggagttcccgctatggcacagtgggttaggaatcggactacagcagctcggggcattgtggaggtgcgggtttgatccctggcccgctatagtgggttaaaggatctggcgctgtcaaagctgcggccattaaaaaaaaaaaaaaaaagaaaagaaaaaagaaaaagcaattgaaaaaaataaaaagaatgagagtgaatgagtaacatttctagtaaagggttgcctgtatcttgtgcagaacatacagaatacatctttcaatgattttagtcaatttttttgcattttaagaaatttctttttttttaattgtggtatagttaatttacaatgttgtgtgaatttcaagtacacagcaatgtgattcaattacatatatacatatatacacatacatatcctttgcagattcttttctattataggttgttacaacattttttttttctttttaaggctgcatgtgtggcatatggaagtttccagactaggggtcgaactggagctatagctgcccgcctacaccacggccactgccacagcaacacggtttccgagccatgtctgcaacctacaccacagctcacagcacgctggatccttgacccactgggcgaggccagggatccaacctacaccctcatggatactagtcagattcctttctgctgcaccacacaggaactccctattataagatattgagaatagctgtcctgtggcacagtgggtaaaggatctggtgttgtcactgtagtggctcaggttgctgctgttgcacaagtatgatccctggcccaggaacgcttgggatggcattaataggaattgtttggtaggagatttttaataaaatgttcaaccgcccaatttttaatagataactacaaatgttctccactgttaaaactgcactttatgtacttaagtggggatgttaaaattatatgggtccgcccgctattatagttgaaccacatttgagacacattcaaaaaagggtaaaaatcgggagttcccactgcagctgcgggttcaatccctggcctcactcagtgggttaaggttccggcattgccatgagcggtggtgtaggtcgcagtcgcggctcaaatctcgtgttgctgtggctgtggcataggctggcagctacagctctgattggacccctagcctgggaacctccatatgccgcaggtgtggccctagaaaagacacacacacaaaaaaaaggttatgttgaagttcccgttgtggctcagcagtaacaaaccggactagtatccgtgaggacacgggtttgatccctggccttgctcagtgggttaaggacccagtgttgccacaagctgtggttgcagtgcaggtcacagacaaagcttagatctgacattgctgtggctgtgacacaggccagcagctacagctcaaattcgacccctagcctaggaacatccacccacagggggcggccctaaaaaaaaaaatatatatatatatatgtgtgtgtatatatatatatatatatattttatatataaaacattttatatatatatataaaatatatatatataaaaatatatatatatataacattttatatatatatataaaatgttaacattgagtaggtttaaggttattattttaataactttataaataaaaattttagattttctcagctttaatttttaattaggtgtggagttcccactgtggagcaacaggatcagcagcatctctgaagcgcagggatgcaggtttgatctccagtcctgcacagtgggtcaaagatccagcattgccacaactggggcataagtctcaactggggctcagctctgatcactggcccaggaactccatatgcatcggggcagccaaaaaagaagaaaaaaaaagtgtctaatatggtaataggaatagatacaacccatgtaaacaaaagttttttggggtcttcaataatttcgaagagtgtaaggggtcctgagaccaaaaagatcaagaacggctggtctacgttctaagcaactgctgtggttcttgttaagttttaatactgaagatgagtttttacaaggacaaacaatataatacagggcatgtagccaatatttcgtaataactataaatggaatatagcctttaaaaaggccaatcattctgtggcaccctgaaatttatatgatacatgaactgtacctcaataaaaaaatttaataagataataataatataggtgagcttcaattagcacattctattacttatctttaataaaaattatattctgtgtgcaaggtaatctgacaaactcaccagtacaactggtttccaacatagacctggctcagctgcagaggttcctttcaagagtaaacttgcagggctttccccgctgtggcacagcagaaatgaatcagactagcatccatgaggattcagggcacagaaacagctcagatttagtgttgctgtggctgtggccatggtgtaggccagcagctgcagctccaattcgacccctagcctgggaacttccatatgctgatgtaggagaaaatgtcccaataaaatgtagaaaggagagaccccggccatgacgactaagcaaagtctagccaactgccccaaccagtcctcccccatgcatctgcttctgtaaatttgtttccgcatctactaccttgcctgacgtcactccagtccaactagccaagcttggacctggaagacgtagcccataaaagccttgtgaaacccttcttccgggctcagactctggagagtgatctcgtctgagcccgccggcgtaataaacctgagttctccaactctccaagtgctcgcttggtttctcgccgggtaaaagagctgctccactatggccacagagctactggagctggtacgctacagccacggggctgtcgccagagctgatacgctgcagcgcagggctgctgggtatctgctgtaacatttctggaggccccagcgagattccaacctttctggccccttgagccactggaacagaggtaaggccgcccgggagccggggagcctcaaaccgaacgaggcggcgcaccacccgacggtattctgggtcctccttcgtcagcggcattcctgattcccgggtgaccaaaccctgaccagactcagtggagagatggaccaactcaccagaaaggtatccggacaaggtaaggcagcggggccaaccccagtcaggtcctgccccagtgggcagaagaggggactgatcaccccctgagggagactctcccggtcagaagctgtgcctgactggagcagcagtcctagtgctccagattggaagcagaggaacctcttgcttgggtggagcaactgtcaggtgtagccaattgaaagttgtgcttgatcgagctactagttagggactcccagggagtgggaggcattgtgataacctctgagtgtgtgtgagagtgaatgagcggcctgattcgcttgtgcttcaggttcgagtttgtggctccacggtcttagtggctatggagtctgagtgggtcctaacctgcagttccgtggtgacctcatagggcttatggctgcagcagactctgagggttctgttccctccctgcaagtccaatccaagttcggggattatacgaaccagccaattgctaagaggcacctaaactcccgagaggggggcagtcaggcggacatctgaatggccaccttctgagaaggaggcaccctcccttgttttgtctgcgacactggcacagggcgtccacatggggtgggacctaacccagaagcccacgagccagagacccctgtgcttccgccattttgggccataaattcctccaaggagatgacctaatttgatcttgcccctgggcctccaggaactcccggcccagattctaaaccagccatgggactgcctattttgtcagttcatggaggcccaggatctgagtcagggagacaagcctgtcatccctggctcagttcagggtatagggaggattgggtacaaggtcccctgtcctttgcccaaaacattagaacttgtctgagagtgccttcctgagaccgggggtccagatggattggagatacttgcaataaagcaggtgctcttcccagtcatagagcaagctgagtgggatctgtcttgctttcaagagtggtggaggcaaagctactggggataccacccacgaggccagaaaaggtctcataatatcaggccatagaaaagatccacataaagacaccatgggttcacccaagtctaaacctgtggttgtagactgtgtgatcaaagatttcaaaaagggattttctgaagattatggtataaaactaacctgatctttcatcatttcctttgccattacctcaaatagagctgtgggggcaaaggaaacagacctctagatgttaagaccatcctgagttgttaccaggcctgtgggggaaaaggagttcatagctagtattcatccaacttaggccaagtgtttagcctcagagcctcggcatagtcagttttgctttttgctgtttactttcatcctggttggagtaattgatggctggttcatccaatttacctgttaactgtggtttagaaactttcctaatgttaatacagggcatgtcagagtgagcatcttaggatttgaaaactcagggcagggcctgtatgcctgggttttcttcacctctgtccagagacaggcactgggcagggatgacgggaagagaggctacgctggtaaggagtggttaattccagtcagcctgaggtcggatgggacatttgaccactagtgtctagctgctccatataagagaggggacaccctcacatagccaagaaaggacaataggcgctggatgctgttttttgtctttttcggatgggagccacatcctcaagcctgctgcatgactcaatagcaacccctctgacatgtgccttgaagaactggaaaaagtttgaccctgagattctgaaaaagaaacatttaattttctttcgaacaaaagcctggccgttatataatctgtcagatggagagtgacagccatctgaaggctcactagcttataataccattctccaattagccagaagttagtcagccttctccaatactgctcaaggctccttctccccgcaagccagtgccaaagttatatctctctctactccctttacaagaagtagcaaacagagaatggaggccaaatacaggtctatatacctatttcacttcaggacttagggcaaataaaaacagatttgggaaaatttgctgatgacccagatatattgaggttttcagggtctcatgcagtcctttgagttagccttcaaggacgtcatgttattacggaaacagacattgactataagtggaaaattacataaagtctccaaaactgctcaaagctggggaagatgaatggaatgatgctaaaaatgccagaggcagattagaagaggaatgatcaagattccccacagggtgtcaggcagttcctatgagcgatcccaattggtctgctgatgagggagataacaacaattggcatagaaatcattttattacttgtatagttaagggattaaaagcccgttaaaactatcggaggtttactaggggaacaagagtccatcagctttcttaaaaaggctcagaaaggcattgagaaaacataaaacagggaacccagaaacaatggagggccaaataattatttatttatttatttattgtctttttgctatttctttggccgctcccgtggcatatggaggttcccaggctaggggtctaatcagagctgtggccaccagcctacaccagagccacagcaatgcaggatccgagccgagtctgcaatctacaccacagctcacggcaatgccggatcgttaacccactgagcaagggcagggatcgaaccctcaacctcatggttcctagtcggattcgttaaccactgcgccatgacgggaactcccgaataattcttaaggataaattcatagctcaattggtgccagatatatggagaaagctccaaaaattggcttttggccctgatcaggacctggagcacctcctcagagtagcaactcaagtatgttataatctgggccaggaagaataaaaggagaatgagaggagagacagagaaaaggctgaggctctagttatggcactacagggagtcaacctggaagttgccaaggtgagaggactagggcagagacctatgcctgcagcctgtttcctctgtggaaaagagggaccctttaaatgggaatgccccaagcctcagaccacagcacctaggccatgccccatatgttggggagatcactggaagagggactgcccctgaagatgaaggtctctggggttgacccctcaggcccaggatcaaggctgacaggacatttccataatggctcctgtccttctcaccactcaggagtcctgggtgactctaaatgtaggaagacagcctattgacttcctcctgaatacgggagccacttttcagtcctcctctccaatcctgggcccctccctcatgaatctgccacatttatatttccggcaagccggttacaaaatttcttacacagcctttgagttgtggctgggaatccattttcttctctcatgcctttctgattgttccagagagtccaactcctcttttagaaagagatattttgtaagaggttaaagcctcaattcacatggcaatggagcctaatcaaggtttatgcctgccttggatggaagtatatactgacccagaagtctgggccataggaggaaacataggaagagaaaagaatactcaactggtggaaataggtcttaaagactggaatttatttctttgccaaaagcagtatcctctgagacccaaggcatgacagggacttgtatcaattataggaagcgtaagagaacagattattaattgactgtatcagcccttgtaacactcctatattgggagtgcaaaaacttaacagggattggttcctagtacaagacctccatctaataaatgagacactggtctcattacatccagtggtgcccaatctctacactcttctttcacaaattccagaaacagcagcatgggttactgtatcatatttaaaagatgcctttattctgcatttccttgactaaggctttgcatatataaattctcaaaatatggaaggtaactaactgaccagaattaattttaggttcaagtcaactgggaaatattcagtattaaattaatatcttaaattagaattgaagtttgctgatctaattaatacacacatgtcgttacagctgtcaacattaggtataatatcttatcgtacctaggtttaacagaagtcaaatgagacactgagacatcagttactaaacagaaactaaaggtatttagaataattaatcaatatgatcagtttcaccctgaatggtctccataagaaaaacatgtgtttttagaaattataaaggacagtctgtggttgctttagaaacgtagaatctgtgtgctttcaatatagaaggaatgagggatggaactgcattttatgaaggcaaaagaaagtctgtcttcagctgattgctctggttggaaaataagggacagactaatatggatacagaaagtgatacaaggtgtgtgggaagtggacactgagaattttgtgcatggtggggactgtctatatttgagtaagttaactttaaaagtaatgtggtgccataaatcatactgctcacaaggacataaggtagctttcaattacatgttgaccaaggcatacaagtgtttcataaccagccagagaaatcagaaaaatcatacaagttacctgtgctattataaaatctaaatgttgtattcttgatggttcacagaatgtgtctaattccctgctagatcttcaacagtagattcatgagcggtcctatccagctccagcttttggagctgccctgtggaaccagccgacctcctcctcctggtgaaaatatttcttcaccatatctttttattcagaccctgtataattaactgtatttcttgcttcattacatcctgattaaaagccatcagccttaaaatgttgatagaaggggtacccaaagcaatgtatcaaagcccacttgaccgtcccatgagtggagacctaactgctttccctaatgacgccccttttcagcaggaagaagtcagagcggtcatcgccccctttccccacagttagagtctctaactcactggtgggattgaggcagaatattcactcaggtagtcagtgtaggaacatgggcttcgatacattctttgatgtggctattggttaacatttgtaaagtaagggttgcacagcaaccccaactgctataaaggttacaggtattaccccatggatccatcacaccggaataaagaaggctgctcccgccattgacacagacacctgggaagctgtccggcaccctgagaacccccctcaggatcaagttccagagacatatggcactggaggatggcaggccctgctctggtcacacccagaagctggccagtctatgcacggcagaaacttgaggagtctacagccctgccccagccacatactggagttggttggtttgtacaagtggaggccagaggatctctatgcaaacttgaattgaactcatgctctggtggggaatattggtaattgaaattgccatagccctcatatttggagtggggctatatgcagtatccccttcagaatggggacagggagcccagctactcatctgtgtgatgtatctcctgactgtcagtatactagaatccctgttcataatgggtcagtgaaaaggatcaaaggaatcatagttctgttaacactcaccctgctgctcactccaggggcaacagactgggacaatgatctatgggatgggacgggattaacagatgcttaccagtgcctccctgctaattggacagggacctgcactctagcctttgtcactcttcaaatagatattgtccctgggaatcagtctcttatggtgcccatagaggcacatggcagaacaagacagcaatgcaagttatccccttatttagttggtttgggaattccagcagggataggagcaggagtgggaggaatagaatcctccactgcttattatcatcaattatctaaagaattcacggatgatgtggaacaagtagccccttccctagtagccttacaggattaggtagactctctggcagaagtggcccttcaagacaggagagcactggacttattcactgctgaaaaaggggaactttgcctgatgaagaatgctgtctttatgccagcagatctggaatagtcagaaacatggcccaacaaataaaagaacgcatagcaaagagaagggaagacttagataactcctggttaaattggagcaactactggagttgggtggcatggctcacgctttggttgggcccctcctcatgctcttcatggccctcacatttggcccctgtatcctgaactgtcttgtcaagtttgtctcctcaggcctagaatctataaagctacaaacggtggtgatgtcccggccacacttatatcagcctctgggccaagaagaccagaaaggttgatgcttgctccaagaatgtgaaaaagcatcaagagggggggatgtaggagaaaatgtcccaataaaatgtggaaaggagagaccccggccatgacgactaagcaaagtctagccaactgccccaaccagtcctcccccatgcatctgcttctgtaaatttgtttccgcatctactaccttgcctgacgtcactccagtccaactacccaagcttggacctggaagacgtagcccataaaagccttgtgaaacccttcttccaggctcagactctggagagtgatctcatctgagcccgccggcgtaataaacctgagttctccaactctccaagtgcttgcttggtttctcgccgggtaaaagagctgctccactatggccacagagctactggagctggtacgctacagccacggggctgtcgccagagctgatacgctgcagcgcagggctgctgggtatctgctgtaacactgagggtgcagcccgaaatggtaaaaaaaaaaaagaaaagaaaaaaaaaatagtaaacttgcaaccacagtaagtatataacggagttcctgtcatggctcagcaggaaagaatccaagtaggaaccatgaggttgggggttcgatccctggcctcgctcagtgggttaagggtccagtgttgccgtgaactgtggtgtaggtcgcagacatggcttggatctgacattactgtggctgtggtgtaggtcagaggctacagtcccaattagacccctagcctgggaacctccatatgtcgcgggagcggccctaaaaggacaaaaagaccaaagggaaaaaaaaaagaatgtatatatatgtatgagtgagtcacttggctgtacagcataaattggcacaacactgtaaatcaactatactttaacttttcaaaaagattaaaaaagaagcattggcgttatcctcaagtacagctggattcccatctgctccttataatgctgcccttgggcaacctccattctccatgttcacagctctgaagtggacataactcttccaagagtgttgctgggcgcattagaggcacaatctagaacagggcctgtacgtaacagataagtgctccacagtggatgaaatgaaatgaattcaccaacaggaagtaacgatcatttcctgggttggtagggtgtgttgtagtgaaacatcctttctcagagggacaaagatcagaaatgcacatttcaaaatcagacactctttaatttaaaaaaaaaaaaagaaagaaagaaaagaaaacgaaaaaggcaaataaacatttaaaagagtaagtttcttctgaggaagaaacctgtttcccaaggtcacccaagccagcagccttaaaatcttagagacataaacacagcaacatggacttgccagaatgttcggttggcaccagtttggatcctggtatcaagactcctggtcattctcctcattcactaaggaatgtgggatgagataattttggggaagtgctggaaggaaagccttagaagggactttagctggtaacgcaagagctacctccctttgctgagttctgccatagcctcagtacaaacgtgtttcttggtttccttatttgtttcggcagcgccagggcatgaggaagttccccgggtggccaaggatcaaacccttgccacaggaggaaaaacgctggatccttaacctgctgcaccatcagagaactcgtatacttcattttaatcctcataaaacatcatctaaccaacacggttccccccctccccttttttaagccatttagggccgcaggtgcctgtgtatggaggttcccaggctggaggtctaattgaagctgtagccatcggcctacaccagagccacagcaacgcgggatccgagccacgtctgcgacctacaccacagctcacggtgacaccggatccttcacccactgagcaaggccagggatggaacttgcaacctcatagttcgtagtcggattcgttacccactgagccacgacgggaactcccacaagacgtatttctgatccttctttctgtttataaaaattaaatgagctcaccaagtccgcacttcctccgttaattattatgctactcagaagttttttttagcaccccaaaccacaaaacggacgctcgctccaccgcgaggctgtcttccggagcagaaaactgaccttttaaaatttttttttcttttggtctttttggggccgtaccctagggcatatgtaagttcccaggctaggaggtctaaccagaactgcagccgccggccttacgctgcaactagatgctacgccaggtccgagtgcgtctgcgacctacaccacagctcacagcaacatacccactgagcgaggcaagggatcgaacccgcgtcctcgtggatacggggggcggggaggggcgtaaaccgttgagctagaacaggaactcctagaaaaccgacttcttcaaaaactctgcctctaaaacccccaagctgttatttaatgcagcgtaaaggacgcagcctccgcttccccacagcctggggccccacagcctggggcccgcacatcccccgagacttacatccccagccctggtcataacctccgagttccgggccgccccccgtgctctgcgccacgagaggcaacctccacgtcgaatgttcccctggaaaaccagtgttccttggggcgcagggcgggggaacgagcaggaactctcaacagcgtcccgaggcgcagtctccttctcgctgtctcaccgacgtacggagccggtcggacttattttggagacccgccgccccccctactcggctccggggtcccgggacctggccgctcccgggtggcgccactggctggccaagtttgacttcccatttgtctctgctcgagggacacgcacctgtacgaagtcatccttaatcccgccgcctcgggacattctgggctggtggtgccactccgcggattggacagccctagcaccaaccccggcaaattcttcctggtaaaccgcgagagcttgggtcggacccgcccacgtcaccaccaacccccgc

SEQ ID NO: 24 - DNA, 2012 bp, Sus scrofa
tccgcggagtggcaccaccagcccagaatgttccgaggcggcgggattaaggatgacttcgtacagccctagatgtctgtcgatcctcaagatattgatggtgcttttggtcctgagcgttggactctttatgttccaaagcgtgttcctcgatacagacttcagtctcctcaactcacccatcccgtcccccaccctggatgcgcagacgctgaagcttctacctgagaaacccgatttctacggtgaaaacgggctgttcccgaaaaaccagtgccaatgtgacgccttcgggcatcaggaaagctataacttggaggatgcctacgacccgcaagacctccccgcagtgaacctgaggagacaggctgagctcgaacactttcagaggagagaagggctccctcgcccaccgcccctgctggctcagcccaacctcccctttgggtacccggtccacggggtggaagtgatgcctctacacaccatccccatcccaggcctccggtttgaaggacctgatgctcccatctatgaggtcaccctgacagcttctctggggacactgaacacccttgctgacgtcccagacaatgtggtgaagggcagaggccagaagcagctgaacattttgaccagtagccgggagcttttgaatttcatcctccagcatgtgacatacacgagcacagagtaccacctccacagagtggatgtggtgagtctggagtccaagtcctcagtggccaagtttccagtgaccatccgctatcctgtcatgcccaagttatatgaccctggaccagagaggaagctccgagacctggtgaccattgccaccaaaaccttcctccgtccccacaagctcatgaccatgctccggagtgttcgtgagtactacccagacctgacggtgatcgtggccgatgacagcaaggagcccctgaaaatcactgacagccacgtggagtattacaccatgccatttgggaagggctggtttgctggcaggaacctggccatatctcaggtcaccaccaaatatgtgctctgggtggacgatgacttcatcttcaacagcaagaccaggatcgaggcgctggtggacgtcctagagaaaacggaactggacgtggtaggtggcagcgtgattgaaaacacattccagttcaagctgttgctggagcaggggaagaatggcgactgtctccaccagcagccaggatttttccggcccgtggatggcttccccgactgcgtggtgaccagtggtgttgtcaacttcttcctggctcacacagagcgactccaaagaattggcttcgacccccggctgcagcgagtggctcactcagagttctttattgatgggctcgggagcctgctcgtggggtcctgcccacacgtgatcataggtcaccagccccatttaccagtgatggacccagagctggccaccctggaggggaactacaccagttatcgggccaacaccgaagcccagatcaaattcaagttggctctccactacttcaagaactatctccaatgtgtcacctaaggtatccgggcattggaaaagcgctgagctgcctggttgcaagtatctaagacagcggatgcggtggctgggataccaatatttgaactcctcataagataagcactgtaatgcccagggagcagggtaggcaggtgggtctgactccgttactggaagtaccaataaaagtacagggtcattagaaatggaccagtcactgaggtgggcaatggagacttcattcataacgattacggcggtgtttccatcatggctcagaggtagcaatccagactgctatccacgaagatgcgagttggatccctggccttgctcagtgggctaaggatctggcattgctgtggctgtggcataggctggcagctgcagctctgatgcgccccctagcctgggaacttccagatgctaagtgtgtggccataaaaaaaaaaaaaaaaaaaaaaaaaaa

SEQ ID NO: 25 - protein, 502 aa, Sus scrofa
MTSYSPRCLSILKILMVLLVLSVGLFMFQSVFLDTDFSLLNSPIPSPTLDAQTLKLLPEKPDFYGENGLFPKNQCQCDAFGHQESYNLEDAYDPQDLPAVNLRRQAELEHFQRREGLPRPPPLLAQPNLPFGYPVHGVEVMPLHTIPIPGLRFEGPDAPIYEVTLTASLGTLNTLADVPDNVVKGRGQKQLNILTSSRELLNFILQHVTYTSTEYHLHRVDVVSLESKSSVAKFPVTIRYPVMPKLYDPGPERKLRDLVTIATKTFLRPHKLMTMLRSVREYYPDLTVIVADDSKEPLKITDSHVEYYTMPFGKGWFAGRNLAISQVTTKYVLWVDDDFIFNSKTRIEALVDVLEKTELDVVGGSVIENTFQFKLLLEQGKNGDCLHQQPGFFRPVDGFPDCVVTSGVVNFFLAHTERLQRIGFDPRLQRVAHSEFFIDGLGSLLVGSCPHVIIGHQPHLPVMDPELATLEGNYTSYRANTEAQIKFKLALHYFKNYLQCVT

SEQ ID NO: 26 - DNA, 58425 bp, Sus scrofa
  modified_base (5753)..(5852): a, c, t, g, unknown or other
  modified_base (9176)..(9275): a, c, t, g, unknown or other
  modified_base (18671)..(18770): a, c, t, g, unknown or other
  modified_base (26990)..(27089): a, c, t, g, unknown or other
  modified_base (45736)..(45835): a, c, t, g, unknown or other
  modified_base (48911)..(49010): a, c, t, g, unknown or other
  modified_base (52558)..(52561): a, c, t, g, unknown or other
  modified_base (52565)..(52664): a, c, t, g, unknown or other
ctcacttccccccccacccccgtcctttccctctgtccctttgtccctccaccgtccctccatcatggggtccacctcgggtcccaggctgctgctgctgctcctgaccagcctccccctagccctgggggatcccatgtgagtaatcacaaccccaacccccaaacaaggctgcttctgcattgggagtgggcacttgtgagtataggtctctgcaggtttagggtgcatgtacggtgctggttgattctgtggcttgtgatgaggttggggtgagtctcagaagttggggttgggtgagtctcagaagtttggactccataggatctgggagtttgtagttttagcatttaggagtttcagagatgcggtttggatgtatgtggctgaggggatggattgggttgtatttataggtctggggtgctagaggtttaggaggctgtttagggtgttccagggtttgggtatttagagacttgaggtatttaaagatttaggagttctgaccttggagcagtgggttaagaattcgactgcagaggccagggtcgctgatccggtgcgaccataaaatgataaaaaataaataaacgattaaaaaaaagattgaagggttgagacttctggaatttgtgggtttgattgtgggcttggaagtccatcgtcttggaggaattggttctgattttgaggttcaggaattgatgggatctgaagcccccaagctgtcctccagtcatcggatcccccgcagggctaggggctggggcagagcgctgaccctgggggtgcctagcatctcgtgcccctgggatgacagctctacgcctcgtcctcccctcccgcagttacaccataatcacccccaacgtcctgcgtctggagagtgaggagatggtggtgttggaggcccacgaagggcaaggggatattcgggtttcggtcaccgtccatgacttcccggccaagagacaggtgctgtccagcgagaccacgacgctgaacaacgccaacaactacctgagcaccgtcaacatcaaggtgggcgcgctcaacagccggaccgctgaagccccaccccttctttgagtcctcttggtagctgagcccctcctccctttctgagccccacccaccctgcctgagccccgccccttctgtctgagtgtctccattctgaaccccgcccctctgagtctcctccccttcggagcccttccccttttggagtccgggtcactttttggagccccctcccactctctcatcccggtctttctctgagtgtccccaccttctgagccctcgtctttctctcagcccggcccccttccaagccccaccatgtctgagcccttccccatttctgacccctcccctccaaccctcctccctaagtcctttcttcttttagaacccgtcccctctccgagtctcctcccctttctgaaccccctaccccttctgagccctccttccgctaagccccctgcctgaatcccccttcccatccctccctctgactccctaccccctctcttgccctttggcccttccccgagtacctcttctctccccaaacctgggcaaagcaggaggaccagaagtgacaagcaggctctgttgcgaggaggggcgggtgcggacccagccgaagtcctagaggctggatggtgggcaaggggtcttggcccctagtgatcccctggttcctgctcagatcccggccagcaaggagttcaaatcagagaaggggcacaagttcgtgaccgttcaggcgctctttgggaacgtccaggtggagaaggtggtgctggtcagccttcagagcgggtacctcttcatccagacggacaagactatctacaccccaggctccacgggtaaggggctgagggtggctgcagagagccaggggcagggctggaggaaggggcagggcctcacccggctctgcttttctctcccaccactgctcagtcctctatcggatcttcaccgttgaccacaagctgctgcccgtgggccagaccattgtcgtcaccattgaggtaccagccgactggggccccagacatacccagggcagggactcggggagagacaaagagagagagagaaacagagaaagggattccggcaaaggcccagcagcagagacataaaggcaaaaaacaaaaccccaaaaacgtaagggcacacagagagatcgggagagaggcggggacccagcgatgcttaccgtggatgacggctccagataagtccctggtcactgtgtgaatctggacaggtcacttcatctttccaagcctcagtttcctcatttgaagactgacacgacaggtactaattctatgtagtctgttccgcctactgcccgccagagggcgcgtgggagcacctgagtcaggttccacccctcctctgcctgccgttttccagggctccccgctcctggggtaaatgcccaagtcctccccacgggcctcaaggccctgcaagacctgctcccgcaccctgcccaccctcctttcttccctctctcttcctccctccgctccagccacgtgggcctcgtcaccgttcttgcaacaatccaggcacagtcctgccccaagacctttgcaggggttgttccccctcccccccaaatgctcttcctgcaaatatccacacagtttgctccctcacctccttcaagtctttgctcaaatgtcaccagtgtaccaattttacagtgaggcttgtcagagcgccctgtaaaattgcaacagaacacacacacacacacacacacacacacacacacacacactcccttttttgccttcctgccatctctttttggcatcttataaatcggagttatttcccccctcccttttttggtctttttatctttttagggccgcacccgcagcatatggaagttcccaggctaggggtcgatttggcctaggccacagcaatgtgggatctgagttgcacagctcacagcaacgcaggatccttaacccagggagcgaggccagggttcaaacccaagtcctcatggatacttgttgggttcgttaaccactgaagcacgatgggaagttttttggggtttttttttgtgggacctattcctttgttaactgcgccttcccccaatctgcactgaacctaagttctgttcagaaagggattatctgttggcccagagtttggcgggtagtagggtaaataaaaacttactggaagaagggagggagggaaggagaggggagtgagaagcagggagtgatggggagagaaagacaagtggaggaggaaggggaggaatggggcctgtcctccttgtgggatctttgtatttattgaaatcaggcaaacctaacaaggaccagagtttttgtgtgtgtgtggtatcagtatgtgtgtggggtttttttggtttttgtttgtttgttttttgctttttagggccataccctcagcatatggaggttcccaggcttagggtccaatcagagctacagctgctggtctacaccacagccacagaaaggcaggatccaaaccacatctgcgacctacaccgcagctcacagcaatgccggatccttaatgccggactgaacatgcaacctcatggttcctagttggattcgtttccactgcactacgatgggaactccaaggagcgggttctgaaggctgtgtgctcactttagtgatggtggaaaacagagaacaccctcctctaaagatgtggcgctgccagactcccattgaacgtcacctcatgccattgggaagaacatatccacaattacctccacttgccagagaagctagagaatcagatttctctttgaagtctcctgatgtttagctattggcaacaaatgaaatcatatacttattaggttgagccacacgaagttgctattcttgcaggtcaaaaaggtgaatgtaggcagtgatgtgtgccttctacaaatcaaatgctcagcccagggtcctatatcaaaggaggtgataaattctagtaattactagtcttcagagcgacacagatcatcacaagcacttgcctacactaacaggtcccaaaccagtgacacaggagctgtagttatctcctttttccaagaggttcacattgagcacaaagaggttaagtaatttgcccaagatcacacaggcttgtaagtggtgcagtggggacaggaacccaggctacctggtttgggtgcccattcttaaccactgcccctgtagacacgacacagaggagaaccaaggggctaagcctggtctctgaagagccacttcccttcctgtctcctcacagacccctgaaggcattgacatcaaacgggactccctgtcatcccacaaccagtttggcatcttggctttgtcttggaacatcccagagctggtcaagtaggtcgggccctccagcaggggtggggtggagtggtcgtgtgttttagggctccccaggagagggagtgggggggctgccagacctggcggactcactagcctgcctcccccacagcatggggcagtggaagatccgagcccactatgaggatgctccccagcaagtcttctctgctgagtttgaggtgaaggaatatggtaagaagaggagggagctgggggggggggggcgtgcataatgttggacccagcgttgaccccccccaccgaacgaataccatctgctcccccccaatagtgctgcccagttttgaggtccaagtggagccttcagagaaattctactacatcgatgacccaaatggcctaactgtcaacatcattgccaggtgagggtctagggggagggcctggggagagggaaggtcaagggatagggcagggatggagggggaggggctcgtcacggccagtggacatttgggggaagactcctcttttcaggaccgggggagtctgagaccccttcccactttgcaggttcttgtacggggagagtgtggatggaacagctttcgtcatctttggggtccaggacggtgaccagaggatttcattgtctcagtccctcacccgtgttccggtacctaacagtggccccctctgagtaactcttcctctccccctcggaagcccttcccctccctgagccctcgctttctcccccagatcattgatgggacgggggaagccacgctgagccaaggggtcttgctgaatggagtacattattccagtgtcaatgacttggtgggaaaatccatatatgtatctgtcactgtcattctgaactcaggtgaggcccgatctgagggcggaggctccgtaccaccatgtggtccagcctgagaggggcagctcagtggaggggagaggatcagaatgaagggcgacccagtctggtggggggcggtgtgtccagtctgagggaggaggtccagaatgaaggcagggtcgggtctgacaggggagacctaggctgggacacaaacccagtctgaggggggaggcccagtcagaggggggaggcccaaaatcaaggtgggatccagttcatgggggagacctagtctgaggaaggtggggtccgtgttgaggagggcagtctggccctccctcatggctggcccccctcaggcagcgacatggtggaggcagagcgcaccgggatccccatcgtgacctccccctatcagatccacttcaccaagacccccaagttcttcaaacccgccatccttcgacctcannnnnnnnnnnnnnnnnnnnnnnnnnnnnnnnnnnnnnnnnnnnnnnnnnnnnnnnnnnnnnnnnnnnnnnnnnnnnnnnnnnnnnnnnnnnnnnnnnnnagctgtggtgtaggttgcagactcagcttagatctggcattgctgtggctgtggtgtaggccagaggctacagctctgatttgacccttagcctaggaaactccatatgcagtgggtgtggccctaaaaaaaaaaaaaaagttttccctcctgcaccagctccaacaccccaaatagtttggtgtgtgttttctagaaaaaaaaagatacaggcagacctcggagtcagttcctggccatgttaataaagcaagtcacataaattttttagtttcctagtacatataaaagttatgtttacactatgctatattctattaactgtgcaactgcattgtttaaaaaaatgtacatacctttattttaaaatacttgattgctatcagagtttcccagcggctcagcagattaagaatccagtattgtcactgctgtgactctggttactgctgttgatgggggttcaatcccctggcctggaacttctgcatgccgtgggcatggccaaaaaataaaagaagaaaaaaaatttaaaaattaaaaaatgctttactgctatcaactatacttcaaagaaaaaattgctagagtaaaaaataaatgctttattgctaacaaaagttaaccatcctctgataacgcagaggtcacaagcctttgatttgtttttcaaaaatgcagtatctgcaaaactcaataaactgaggtatgcctgcattctcctacaaacccacagtgcagtcattagaattaggacgtcaacattaattcattactaccctcaaatcctccatcaccattcaaattttgccagggttttgttttgttttgttttttggtgtttggggttttgaggttttgtttttgtttttgtcgtttatagggaaaggatcctgtccagaatcacaggctgtgttttctggttgggtctcttcagtgtccttggacctgtctgacctttagagcactttcttctttctgtgactttcacatccttgatggatacgaagtacacagactgagatcttggggactgtcccaccatctgggtctgcctgatgctccttcatgacagcactcaggttttgcatttttggcaggactgtcacggaagagacatcgtgtccttcttggtgcaccatttcaggtgacaaagggtactgatttatcccactctttggtgatgtgtaccctgattgcctgattaagctaatgtctgccgggtctctccattgtaaatgtcctctttattcctttttagttatttttaaaaacttctctttaactatcagatagtggcaaaattcaagtcaagagagatttccctccaaatcagtgttcacttagcctttaagacaacaggggtggattccttatattgtaatgtatgattttcaaacacaaccgtactttttttttcttttctttcttccttcctccctcctttcatcccttcattcttccttcctttcttctctttttctttccttcctttttttttttccttacaaaaaagcacccacctctcaaaggcagccattgattgccaaaatgggcaaacatttctaaattcctgtagtggaaagctagcagcccctgcagccctccaaaaagaaaaagattcccaatacacatgagcaaaggatcttcagtctctttgcactttataactaggcgtgctgctttctgctccagtgacccaagatgttcttttgcaaagaggaacgtttttttgcaaggaggaaatttagacaaaacatctgatttagaggggtacagtttacacatacgtggatttttttcaacattgtgtcattactttaaccagttgggggtgagccagaggattgattaaaagtcagtaccccaaaggcactttgatggattattccagagcgcagatggatttaggcatctctggaattccacctacttggttgtaaggcagacccagagccaaaataaaatctgttcatcatttttttgaggaaagcccagccagggttgaactctgttcccgcccagcttgctgatggtgtcaagctggcttttaaaggccacctcctctccagcagtctccatcaaagtccagggaatctttcaactcaccccattgctttcaggaaggacttttaaccatcagacacagcagcaggcatggtactcagggcccaggatgcttctggagggtcttccgtgcaaaggtttcattccctcaaaaaccaaagaagggaaagaaatcaatacaattcagcctggattatttttgcctttatgccaacacagttgtaaaatagggtttcccatatattttatggaagaaggagcccccagagtcaaatgggcctggggtccctggaagtgatcacatggtcatgggtgtgtggcagctaggaatccctccggggattgtagagatacgtgtctaaaaggggacagcgagaaagtgagtctgttccaaacctgggttgttcccctcctcccctcttcccccaaaaggtgacctggatgaagaaataatcccagaggaagacatcatttccagaagccagttccccgagagctggctgtggaccattgaggagtttaaagaaccagacaaaaatgggtaaggctgggatgaccctgcttcaacccccgccgccagtacccagggacagccccctctcatcacactagaactggacaatgaatttgcaggtacctggagtcccccttcttttctttcttgggggaatcccacaacccaacctaaaaaaatcaagcccttgggctatcagccactgccccacacactacagtccgttcctttcgcatctactaaaaatttatcttgtgtttgtttattcttcattcattatattttctttctttctcactgcctgcgctgtgactccttttctctctacattctgtttatcatcatcttccacacaactcatttcttatcctcaccaccaccactctctgctccaaattttgaattttacacccagactcctctctgctatgtgaagcgcctacaccccgtcactagtgttactctcttatcgctgacctcccttgtaccctcccatttatttcttttttttttttcttttgccctatctacctgcctctctttcccatcccatgtttgccatgttgaattatgtttatttaagaatatgtttagagagtgatgtctctattgatgatgactacctgctgtctctcatccgcgcgacatattcattatttataccatttggcgtacttcacttgtctaacacaatccttatccgtatataaagagatgatgaagaaccccccgcccgcccctgnnnnnnnnnnnnnnnnnnnnnnnnnnnnnnnnnnnnnnnnnnnnnnnnnnnnnnnnnnnnnnnnnnnnnnnnnnnnnnnnnnnnnnnnnnnnnnnnnnnntaacccactgagcaagaccagggatccttaacccgctttgcacagcaggaactcctgggctttttttttttttttttttttttgagccctgagattttttaatcccccccccctttttttggcttttctagggccgcacccgtggcatatggaggttcccaggctaggggtctaatgggagctgtagccgctggcctacaccacagccacagccacagccactcaggatccgagctgcatctgcaacctacaccacagctcatggcaacaccagatccttaacccactgagcaaggccagggattgaatctgcaacctcatgcttcctagtcagcttcgttaaccactgagccaggatgggaactcccttaaattcctgacatcttctcaacatcaactctcttctcaagatcaactctctctcatctcatttttttttttttttttttttttttcttttctagggacgctcccgtggcatatggaggttcccaggctaggggtcgaatcggagctgtagccaccagcctacagcagtgtgggatctgagccgcatctgcaacctacaccacagctcaaggcaacaccagatccttaagccactgagcaaggccagggatcgaacccgaaacctcatggttcctagtcggattcgttaaccactgtgccacaacgggaactcccaaaataagagatttttaaaaaccgttttaggattccagaaacaactgagcaaaaaaatataccaatggctgagtaatagtccatcatgtatctgtactacatcttctttatccactcctctggacacttaggttgcttccgtgtcttggctattgtcagtagcactgcagtgaacacctggtgcattcaaattatggttttcttcagtcttttccatttttaattcctttttttcctttcaaatagagagcaaggggtctagctttcctcaggcagcataagctaaccaatatttaacacaatcattctattttccttgaggacactcttatttatagcacaagaacctggtttctcacccatgtcctaaattaaatttaagtttagaaaaatttataaaaacaaatagtaagtaagaaatggtaaggagcaccagtgactaatcagacaccccgagggtgatgagtaaatgacagtaggttgggaaataaggattttgttcaagcctctgattataatttttttttttgctcttgaagaataagaacaatgcacaaatcttaatagatttcttagtgtaacattattaataatgtgttaacagtttgtgcagtttcacttgcatcagcactctgcttgcatttgatcaggtaatttttgtgtcatatataacattgttttcagcatcatttttgatcaaggttgttatcaaaattcaacggagtaaatttgaagatgtaattggctttattaaacaattcatgaattgggcagcgtctcatctggcaggcagagagatactcagaggagttgtgaaaaatggaaggttttaatagaatgaagtctagggcaagagagtaatcgcaagatacaaatttcatcattggaggaaaataacaattcaggtgggagaggatctccttggctgagctacagtattttcattcgctgggctttttactgggcaggaagaaagtcttccttcctcctgctgcagtaaatttcacttcctatttgggagtgcaaggtacttctctttcctttggggtctgtaattgatgcttcttcctgttgggatctgtaattgacatcttcctgtttggggtaattgacttgcttggtggagcattagagctccctctacaggccttccctacttcaatttagttaaggtttacttttactaatttttacaatgtaaatcagtgctgtccattagaaatataatgcaggttgtaaacgtcatttaaaattttctgatagccctgtaaaaaagggataggtgagtgagttcccttgtggcacagtgggttagggatcctgcatcatcactgcagcagcccatccctgctgtggtgtgggtttgatccctggcccaggaacttccacatgctgtaggggcagccaaaaagaagggatggtaggtgaaatcaattttaataatacattttatttaatccaaatatatcctaggagttctcattgtggctcagtgggttatgaacccaacttagtgttgtgaggatgtgggctggattcctggccttgctcagtgtgttaaggatccggcactacctcaagctttgcataggtcgcagatggggctggaagctggtgttgctgtgactgtagtgtaggctggcagtgacagctcagattcagcccctagcctgggaacttccacatgctgcaggtgcagccctaaagagaaaacaaacaaatatatccaaaatattattatttcaacattttgtaaaaacttgcaaaaccactatcacactgatactgttacaataataaatccattaatattttaaaataagctattaataatctcaaaattgtgatatcttttagttttatttgtactaagccttcaaaatctgccatgtattttatacttactgatatctcaattagaatgttagcttttcattagaaatactttgatctgtaattaccatccataaaatttacagttaaaaaggaaagtgtacccaagttgttgtaaatattcttttttctttctttttttttgtatttttgacttttctagggccacttctgcggcatatggagattcccaggctaggggtctaattggagctgtagccaccggcctacgccagagccatgtctgcaatctacaccacagctcacagcaatgccagatccttaacccactgagcaaggacagggattgaacccgcaacctcatggttcttagtcggattcgttaaccactgtgccacaatgggaactctgtaaatattctttaaaaagttatccagtcactgaatcaagcatccttttaaaaattgagatacaggagttctctggtagcctagcagttaaggatccattgtgccactgctgtggctcaggtcgctgctgtgatatgggttcaatccctggcccaagaactttcacatgccatatgcacagccaaaaaagtgtaaaataaaacaaaattgtgatctaattcacataccacaaaagtcaccctttgaaagtgtacaattcagcggtttttagtatattcacgatgcacattgtttttgttttttggtatttttttttttagggctgcacccacggcatatggaggctcccaggctaggggttgaatcagagctgcagctgctggcctataccacagccacagcaacaccagatctgagccatgtctgtgacctacactgcagcttgaggaaatgccacatccttaacccactaagcaaggccagggatcgaatccatatcttcatggatactaattgcatttgtaaccactgagccgcaatgggaactcctgcacagtgttttttcttttcttttttttttttttttcttgtctttttgtcttctctagggccgctcctgcagcctatggaggttcccaggctagggatccagttggagctatagccactggcctacgccacagccacagcaacaccagatccgagctgcatctgtgacctacaccaccgttcatggcaacaccggatccttaacccactgagcgaggccagggattgaacccgcaacctcatggttcctagtcggattcgttaaccactgagccacgacgggaactcctggtttttaagttgaaatctgagttaactaaaacgaaataaaagtaggaatccagttctcaactgagctagccacatttcaagtgcccagggtccacttacagtcatcattttggagagcacagatcagaaccttcagttatgcttgccttcttcccttctgcatatttacctatgaataacattacaaagaaaatgagaatttctctcacagcaactcccatccaccaccaccacctgtaagatatcactattaatgatgtgtctctgggctctgccagggcaggcggagcttgggacagctcttgtggtcaggggtgagccctgagatattggcagggtcaggaacttggacctgaacttggatccagcccaccctccctgccccctaccaccgacgctgtgttctgtttccacctgggcagggatctgcgtggctgacccctatgaggttgtggtgaagcaagatttcttcatcgatctgcgtctcccctactccgttgtgcgcaatgagcaggtggagatccgagctatcctctataactacagggaggcagaggatctcaaggtgagcctctagtgtgacaggcatgatggggagcttggagggagggtccatggcacactctcctgacttgatactccctcttcctggcaggtcagggtggaactgctctacaatccagctttctgcagcctggccaccgccaagaagcgccaccaacagactctaacggtcccagccaagtcctcagtgcccgtgccttacatcattgtgcccttgaagactggcctccaggaggtggaggtcaaggccgccgtctacaaccacttcatcagtgatggtgtcaagaagaccctgaaggtcgtggtgagtctttggggatacctgctgccccttgtccttcaggaaagactcctgtcttcctgtgctgtgaacccaggttggagacccaggctaagaatacggagtacttctcagaaaatttaggagttccggaagtttggaagcagggctgggattagggtgaggcaagtgaggcattctccttgggcatggaatttcaggggacactccaaagcttagtaacagagatcaatgatattttttcgttaaaatatagtttaatgtcaaatatgacatttcgtaacacatttcagcagaggagttttctcttgactaaaaatcttgggaggagttcccattgtggctcagtggttaacgaatccgacttggaaccatgaggttttgggttcggtccctggcctcgctcagtgggttaaggatccagcgttgccatgagctgtggtgtaggtcgcagacaccgctcgcatcccacattgctatggctctggtgtaggccagcgactgtggctccaattagacccctagcctgggaacctccatgtgccgagggagcggccctagaaaaaggcaaaaaaaaaaaaaaaaaaaatcttgggaaagcatatttcacagaacaaatattataaagccataacatacaatgctagaacagaggaaacgtctatttctacctatgattcttaccttaaaatatgcattaacagttacttttccatgtcctatgattaaacatataatagataaaatcaacaataaaaataaaagtattatcatcttttagtaacgttttaaagcaaaatgtgagatcataaacaagatcaaaaatatttaattcaagagtacctgttgtggcttagcggtaacaaaaatatttaattcaagagttcctgttgtggctctgactagaatccatgaggatgtgggcttgatccctgaccctgctcagtgggttaaggatctggcattgccatgagctgtggtgtaggtcatagaagcagcttggatctggcattactgtggttatggtgtagccagcagctgctgctccaattcaactcctaccctgggaacttccatgtgctgtaagtgcagccctaaaaagacaaaaaaagtaatgcaatatattaagaaatcaaaattaatgccccaaaccctcacaacaaacaaaatatcaaaattttaaatagagacaggatctgacagtgtcaaggcaaaccatattggagcctgaagcagaagaaaaatgagttgctccataaatgtgcctgtatgtatttttaaatggttaattttccccaaaaacattacagtagctgaaaaaatattgaaacattgaaaaccaagtgtattaaaattgacagagtgattttccattgaagtattttgtttatacccaaaccagaatttattataatttttctttattggctttaataaaagcaaactcatatttttttcaactactttactgttctggaataaaattaaccattaaaaatatgtgaaagtatatattttggggcacatatttttctttcttttctttcttttttggggggtgtctttttagggccgcaccatcagcatatggaggttcccaggctgggggtcgaattggagccattggcctatgtcacagccacagcaacgccatttctgagccaagtttgtgacctacaccacagctcatggcaatgccagatccttaacccactgagtgaggtcagggatagaacctgcatcctcatggatactggtcagattggttttcactgagccacgatgggaactccacacacatttgtccttttgccttgagtttctatatggctcagcttgggcactggtgagaagaaagccaggattttgttagagtttatattgcccagctcccaaaagccagtgtgcccatcacttcacaattctgtactcactgtggctggtagcttgaaaatcaccatgttgggaatatttacaccaaggaaattggcagcactacaaattaggaacttttcttcctgaaaagctggatgttatatatttaccaacacaccattggaggcatcttagtctgcaaaggaaaatctgggaattactaccaggtgaaaggagaatgagttctaggaagacaaaaacagccaccgtccaccatggagatttatgtgtagacacataagggcttgtagtgggcctttgatcctaattaagacagttctgattttaactgagcccttactatgtgctaggcactatgttaaatacttgtgtgaatcctttcatttcttttgtgagaggggggtctttttaggaccacacctgtagcatgtgggagttcccaggctagaagctgaacgggagcttcagctgccagccttcgcctctgccacagcaacgccagatccgaaccacatctgcaacgccacaccacagcccatagcaatgccgtatctttaacccactgagcagggccagggatcaaactcgggtcctcatggatactagtcaggttcattaccctgagtcacaacaggaactcctcatttcttttttctttactatttattctcatttgtttatttgaaaatgttgttttacttttaaattatttgttttattttacaatttttatttttattttagttagcctattgagaggcactgggttaaaaacagactctggaaccagactctcaggttcaaatccacactgtgttctactagctatgtgaccttgggcaaatgacttcatccatctgtaccccagttcccccatcttgaaaatggaagtgataatagcagtatccaccccattgagtcgttgtgaggattaaatgaattaaccccagtaaagaaatcttttaggcacataggaagatttctatagattttgttaggtcattattaacttataattttattattaatctatacaacaatgggtacgaggtagatgtttatattatgtctttataaggaagagagctgaggcacagacaggtgaagtaagtgacttccagtcacacagctaagatctagtggatgccatcgtgcatatgctacagtaatccccagaacaatgcctcgctgaccagctgtctgtctgtctgtccttttcttcacgggactccccctgcccccaacactatccagccagaaggaatgagagtcaacaaaactgtggtcactcgcacactggatccagaacataagggccaacgtgagtcagccacagaaggggtgagggctgggtggttgaggcagggtagggtgggaggggggtggttgaggcagggtaagagtgggagggggctggtgcaatgggtgtctcccattctcccggcagagggagtgcaacgagaggaaatcccacctgcggatctcagcgaccaagtcccagacacggagtcagagaccaagatcctcctgcaaggtgagaggcccttggcttcgaccccaggggacccagaactgtgttgggggggcatgagcccagttccatctcatccctcctcctcttcagctagaatttctctttgatctgcttcaggaaggctccaggcactatttagttcagccaatagcttttgctgatgaagaaatttattattttttaatgaatttattatatttatagttgtacgacgaccaccacaacccaattttataggctttccattcctaacccccagcacatcccctctcctcccaccctgcctcatttggaaaccatacgtttttcaaagtctgtgagtcagtatctgttctgcaaagaagatagatcattgtagctctgataaagaaatttaaataagaagcagtatagttccagagcagaaattctggatctgattgccctggatggggaactcgggcaagaagggacaagatagatctgaaaaggcaccttgcaacctgtaaggtgtaaagttttgggaggagacccttggttccctcatctgtgacgggggcaaataacagtatggttacctaagggttgttgggtgggattaaatgagatactatacagtgttctcttagaatagagcctagcaaatagcattaagcacgatataaatattcctgactattgttactggaattatgttaccactggtgtgtaacgagaggaaccagggactggaaatcccctgtgaagcacaagctcacccccaccactccgcaaatgcagaatccccctccagctgctcagctcctcccatcacataccctccagctgtccctgactcctttggccctggctggtcagagtctggaaatgctgggggcagccctggtcttgaatgccatcttaccgtctggctgcagggaccccggtggcccagatggtagaggatgccatcgacggggaccggctgaagcacctcatccaaaccccctccggctgtggggagcagaacatgatcggcatgacgcccacagtcatcgctgtgcactacctggacagcaccgaacaatgggagaagttcggcctggagaagaggcaggaagccttggagctcatcaagaagggtatatgccgcacctcctcctctgagctgtctaggcccctgagaccccgcccctccgagccccctccaaccagaggcccctcccctctagaggccccacctctctgagccctctccaaccagagactccgcccctctataggcaccacccctctgagcccctcccaaccaggggccccgcccctcctctgagaccacccccttgctcctctcnnnnnnnnnnnnnnnnnnnnnnnnnnnnnnnnnnnnnnnnnnnnnnnnnnnnnnnnnnnnnnnnnnnnnnnnnnnnnnnnnnnnnnnnnnnnnnnnnnnncctctatctgatcctcccactttctactttaagctccccttccccaccccaaacttgtcccctgctcagaaccctctctttcttctctgtacccctgtcccacctctcacagaatctttatcctctttctaagcccctcccctccctggcctacccatggtagccaccccctccactcagcctctgttgacacttctcccttctcggcagggtacacccagcaactggccttcagacaaaagaactcagcctttgccgccttccaggaccggctgtccagcacctggtgagtctccaagatctgcttgcccatccttagccttgcacctccctgagcagggcctggatcccggcctcaggtggtctaggttggcctcgcccacacagccctgtgcgacttgacccctctactcacgaagtcaaaacaccagccagatgagtggcctgcatgccacaccgggtcctgagtttggggaagagaaactgggcggaccaggccaggccccgcctctctctgttcattgcttggctgggatgcagtcttcggatcccagagccaattggctcatgctctgtgtccgcaggctgacagcctatgtggtcaaggtcttcgctatggcagccaacctcatcgccatcgactcccaggtcctctgtggggccgtcaaatggctgatcctggagaagcagaagcctgatggagtcttcgaggagaatgggcccgtgatacaccaagaaatgattgtaagaggaagggactcagagcaggcagggggagaggggcatctgagcatcacaggttagcggggtgggggggtgggaggaagactccaccatccacccatggcccaatccattgtgccaggggacaggggataagggagctgggagtgccactcctccattgcaaaaaacaaagacttgcaggatccggtgcaaaaggaaagttcccaggtcacagagctgcttagagccgtggtcctcaaagtgtggtccccaagccagcagcatcagcaccacctgcaaacttgttaaaaatacacattttcaggatggactccagaggcactgaatcagaaacaataggggcaacgtctagaaattggagctttaacgcacatatacacacatctctgctgatgctggtgtgtgctgaagttggagagttgctgccttagcctgaccttgctggctttcacacagctttctcctgccccccttcacactctacctggactgctagaagccttgctctgtccagccacagggcctttgaacatgctgtttctgctgcctgccctgctaacccctgccctctttgagagttgactcctactcactcttcagattgtggttccatctgtcacccctcagagacacttttccacgactgagtcactcttccactgtccattctcaatgccatctccacttctcctgcacagcactcatcagtttgtaattatatatctgtggatgacctggttggctcatgtctgtctcccctactagacagggagctccatgagggctgggctggggtctggttttctcccaccatcttatccacagctccatcaacatttgcagaatgaatgaatggatactaaagagcttggccctcttggggagaccctggggagagacccagccctgccttgacctgctgatcctacaggggggtggtgggcatgtggggacatgatgttcacccgctccgggcttcctgcttcccctctagggtggcttcaagaacactgaggagaaagacgtgtccctgacagcctttgttctcatcgcgctgcaggaggctaaagacatctgtgaaccacaggtcaatgtaagtgtcccttgcctctccctcctcccctcccctgctcaggacacatcaggtgaggtatggatttggggccatttccagtcctcccagtgtgacaaccaccatcacagtggccataagagtacctaacatttatcgagccattaactaagatactcacctaaaagcttcacatgtttaagtcctgtaatccttgtagcagcccaagagacaggctacccttattatccccagtttttagaagagaaaactggagctcccatcatggctcagcataaatgaatctgactagtagccatggggacacaggtctgatccctggccttgctcagtgggttaaggatctggcgttgctgtgagctgtggtgtagatcacagacgaggctcggatcctgtgttgctgtggtataggctggcaactatagctcctatttaacccctagcctgggaacctccatatgctgtaggtgcagccctaaaaagacaaaaaaaaaaaaaaaaaaaaaaagagagagagagagagagaaaattgaggcacagagagatcaaagatcaggtcctttccgcctgttctcccatttctagagagtcatagccaatttcagcagaagtcctctcagtttgctttccacagcactcctccacatgcctccttgctgcttccctagagaaaactcaagacacagagcttaaaaagaggagaaaaaaaatcctcaagaccatttccttagtttagagggtctttcagggtatttttttaaaggagtccatgatcccaaaagggaagggatttaaaatgttgactattcactgtccccttttcctctggctttggttctgaagcagagaagtttgaaaagacaggctctggagaatctgtaatcactccatctgctttgccctgggattttgaggctgggttgcttgactttagcttccctacaggggaacctcaggctctcatcttcagccagctgcttctacctcctcagaaccccagaaaagggatggaggggaggggccgttgcctttaatgcccaaaagggcccaggccttcctggttccaacctggaagatttgagagaaattatagtagaaatgagacaacactaggactaggcacggggtaggggtggggatgtcagagagaagtgacttcaaagcctgactctcaggcacttccccttcaaggccttaatgtgtgcatctgtaaaacgggtatggtggtctttgtattgtttaggactctctgcattgtcctagatggaacacaagtgtgacccagattatgcaaaaatagggtatttattttagggatccaagaatttatcaagtgcaacgataaaagagtcctcagggactctgccagaatgcttcgtttttcacgtcctcccatatctttccttcccttcttgcctaataattcaactttcctggccatccggcctgcctggccaaactgtcttccttggggaaatagaccaaagcaccagcagcagaatctcagtgacagattctgattggctcaccgtgggtcaggtgatcacctgtggaccaatcagctgagggaggcagtaggtcttagtgggcaactatgtgcgcttctggtgcggccttgtgagtggaagtgaggtgttctaacaacagtcatcgacaggtgtagaagagattcctgggcaggcaaaaggatcatttctactgtaatataacattttttactatacatattataatgaagtatggcataggctgtggaacccgactgctggcatttaaatcaggagtatgctgaacccatccgtgtaaaatctgtaaaaccagttgttaaatttccaggaatttgcaagctggctgttaaacacgatcgtgattaaattaaattataaacttacagtgaaaaactgtaaacattaaacagtaaaaacaggcgttcccgtcgtgacgtagcggaaactaatctgactaggaaccatgaggtttcgggttcgatccctggcctggctcagtgggttaagaatccagcgttgccatgagctgtggtgtaggtcgcagatgcggctcagatctggcggtgctgtggctgtggtgtagaccggcagctgtagctccaattagacccctggcctgggaacctccataagcctcaggtgcagccctaaaaagacaaaaaagatttttaaaaaaaggacaaaaaaaggagttccgtggtggcgcagtggttaacgaatccgactaggaaccatgaggttgcgggttcggtccctgcccttgctcagtgggttaacgattcggcttgccgtgagctgtggtgtaggttgcagacgcggctcggatcccgcgttgctgtggctctggcgtaggctggtggctacagctccgattagacccctagcctgggaacctccatatgccgcgggagccgcccaagaaatagcaacaccaccaaaagccaaaagccaaaaaaaaaaaaaaaaaaaaaaaaaaaagacaaaaaaaaaagtaaaaacgcaggtagtaaacacttaaaatgtatcacttcctaaacattttgctatcttttatcatggttcttttgagaatttatgtgtattgtacttgtatagtggaaatattatgtaatgttgaactactgcccatctcttcccaaatctacattcaatgatgtgggttgattgatggattgaaagcagccatgataatattgacatcatagaaatgacaaacccttcaaattatgttttcccccaacccctatctttctgggtcacagcatttttctctgacaggaggataatgatgaaaataatacctacctcatagtatattatgagattaagtgagcaagtatatgcctgggacatagtaagagctagctatgatggggattactctcagataagaagtgttcccttggtgagctgaatctggctcacactagctcacgagtgcctacggggggcatctctaccccactccatgttcagggacttcacattggtagcttaaaactgaccatggtagaatttttacaccacagtaattggtgatgcataaaggagcacccctcccccaaccccatgcctccattggagagctgattgttaaacattcaccagcacaccatggggtatacagactgccccccccatccccgctgccagcacatagtaggtactcagcaacaaagcagctcacaatgagaaaacttcaaaagtaggtagtagatccaaggcaggtcccaaggacagataccatcctggcgcccaggaagtgatgcttgtgtgatccttactagttctctgtggcagcaacgcccacttgatcagaatacccaatcctctttctcatagagcctgttgcgcagcatcaataaggcaagagacttcctcgcagactactacctagaattaaaaagaccatatactgtggccattgctggttatgccctggctctatctgacaagctggatgagcccttcctcaacaaacttctgagcacagccaaaggtaagaggcagcctggagagataaagaagggggtgcatggctagggtttgagggtggtcctctcaagctgggatgcatgcctctaagctgcactgggatgtgcatctccaagtggagctgggctggatggctctacaaggtgaaaagctctcattgtaaaccacacaggaaggctcactgcataattcatgacagcagtgaggtgtcattaagaacatgggctctgacctcaggcagactgaaaccgaaaccccactcagccactttctcactgcctgaccttggacaagtcatttaacttctctggaccttagtttcctcatcttaatacctacatcgcagggtggtcatgaagattaaatgtataatgcaagtagaagagagtctagcacacagtaagagctctgtcactgataccattagtgcctttaattttattttaatttttgtctttttagggccacacctgccgcatatggaagttcccaggctaggggttaaattggagccactgctgctggcctatgccacagcacagcaatgcaggatccgagccatatatgcaacctagctcacggaaatgccagatccttaacccactgagcaaggctagggattgaacccgcatcctcatggatcctagtcagattcattaactgctgagccacaaagggaatccaccttcaatattgttaaaaatattatcattatctgaaagcatagggaacttagcacagtgcctagcacagagtgagtgcttaatttttggtcccagctgatgacactgtatcatgtttgcactcactgatgtgacatatctcaagtaatggaatgtaacatatacaaaagtcatttaacacaagaataatttattggtggtggccggctctcctccacacagagatgcagagatctaggcctctatcttttcatagctctgccgctcagaatccatccatgtaagctgagggggaaatagtcaggaagactgtgcaagggaggtggaccaaacatggaaggggtcccatcattgctgtgcacattccattggtcaaagcttagttatgtggccatacctacctgcaaaggcatctgggagatgtagtccaactctgtgcccaggaagaggagggtatgattcttagtgacagcctctgccatcagtattttcttaggcacttgtgacatacagtgaatacagtgcagcccttcccattatggcctcacacctcagttgaggagggaaaatgaattaatagattactgtagaacattatagcattgggatagtagaagcacaggatgctttaacggacaggaggaagaagggcctcacttcctcttagggtgccattgaagctgaattgtgcggggtgagaattaaccacaggtagatggagaaaaattgctccaagtagagggaacagaatatgcaaaggctcataggtttaaaaaaaaaaagagcaagtttagggaatctcctgcagtggggctgcagttgagaattcaaatggaggagtgagggttgatgagggaagagagcaaggcagaagacagcagattgagggtcttgaatgtgggccaggacacttgaaaaccaagtccagtatgagtctttttttttttttctgagctttctctgagctatttacaggctgaacagagcattgagagtgggggttctctctgcagaaaggaaccgctgggaggaacctggccagaagctctacaatgtggaggccacatcctacgccctcttggctctgctggtagtcaaagactttgactctgtccctcctattgtgcgctggctcaatgagcagagatactacggaggtggctatggatctacccaggcaagtagccccacccccaccccacctccaccccaggcacctgcatcccaacctcttctggcctcccactagccttctggagtaggcactgagaccaagagaggtaggtcttctgtcccataagccaggatggttggaatgaagttgagaaatctttttttccccccttataaacccatctctggatctagactacattctgagtgctccaagctgtgttctgagcctctctttccctcttgacatctaggtcatgttctcagggctcaggttcagatgtgagcctctctctccccctggttccccagttccaccagattccctatcttatcctgtctcactggtaggttctagatcctgttcatctcaccagacccccaatattaccttgtctcattggtaggttctagactggatttttagttgttctgggccattatccaagcttctttctctcacttgtgggatctagaccatgttctcagctccttcaggctctcaatattaccctgtcttactgtgagttctagaaaagggtctcagctattctagcccccagtaggttctagaccatgggttctttagccccctttatttctagtgggctctcaatcacattctcagtgtttgggattccaaatcagatgctcagtgttcccaactttactcttttttaatgagtgggttctagacatattcccagcacttctagactcttgtcttagatgctctcctctagatgggtctagactactttctcactgtggctagactttcagtcttatgtctgccctttctggtgaattctagacatgttccccatgtctccaagctcttgtctgaacccctctcactcagagagttctagaacatgtcctcagtagccaacaaccctcgatcttgttcttgaaggccacaatgggtgggttcaaggccacagtttcagggccccagctctgatctgagactcttcatccctcagtggggtctaacaactttcttgttgcccagattcannnnnnnnnnnnnnnnnnnnnnnnnnnnnnnnnnnnnnnnnnnnnnnnnnnnnnnnnnnnnnnnnnnnnnnnnnnnnnnnnnnnnnnnnnnnnnnnnnnnaaggtagctgcgggaaactttcccagggaaacggtattccggtgtgaaatggtatggacaagaaaagctatttctgtgtgaaattgttatccgcaatccaggctctggaccccttccatgaattttctgcagtcctcatagtagtgcttcgaggtagggtgaccaagctattctgccattcctgagactctctcagtgttcgcactccaagtactgcatcctgggaaaaaccccttcccccaagacgggacctgggacccttggctgcggggcttgcacctgggaaatgtctccttgagcaacaacatacaaagaaaccaaatgggactaaaaatagctgcatgggcgttcccgtcgtggcgaagtgtttaacgaatccaactaggaaccatgaggttgtgggttcggtccctgcccttgctcagtgggttaacgatccggcgttgccatgagctgtggtgtaggttgcagatgcagctcggatcctgcattgctgtggctctggcgtgggccggtggctgcagctctgattcgacccctagcctgggaacctccatatgcggcgggagcggcccaagaaatggaaaaaagacaaaaaaaaaaaaaatagcagcatgcttgcacagttggggcagattatggacagcaagatataaaaagaccaaaaacccagctgccatatctgaggagccaggagcaaaagctgggtgctgtgcatgccctctgcacacagccccaccaagggggcaggcagaccacctaagccacccctctggcacccctaccctcaccccacttaaggaaccagctacacacacacacacacacacacacacacacacacacacacacacctgccccaagtaagggacacacacgcacatctgcccccagcaagggaatacttgttttcctttcttcctgctgcagcaggagctaaataaagccttgcctgaatttcttatcgggcctcttactcaatttctgttgactgggaaagccaagaagcctcatggttaacacccccagtctggggcaagccggaatggtcagtcactctacttcaaggtagacattaggactcccttttccagatgcagaaaagagtgcccaagagaggttgcctaactgttccaggtcagcccccaagtcagaacacaggaggagagccaagcagaccagaccacgctgggaaggagttcaggagatttgctcatcattctggctgtacccctcatgggctaccagctttgacccagctgcagcggagcctataagaaccagtgaatttgtgattctcagaggaggaaagggggagggggaaaggacagaagaagagggaggggaggaggagggagaaggggaggaggaagagatggggggagaggaaaaggaagagggggagggaagggaggcgcaggggaggaggatggggaaggaggagaggggagaaggctaacatattacacttatgatgttccaagtatctactaagcactgcctatatcttacctcgtttaatcctcatcaaacccctatgggattaactcctcttactctcatttccatggaaccaaagtcatggggcatggattggaacagccgaggtccccatgtcaatgaaccctggaaccaagatttgaacctaggcagtgcgactccagagcctatctcataacaactccccatggagttgaatcctcagaacttaatcccatcaggtaggcaggggttcatcaccctaccggataatcaggtgacaaaaccaagagatgaaggcatgtccccaaggtctaattgccttcaagctggggaagtctcttaccaaaatctgaccacgatcgccatggccactcacctgcaagcaaagagaagtctacagatccctttgatttttctttcctctcttttatggctgcacccgcagcccatggaagctcccgggctaggggtcaaatctgagcagcagcttccagcctacagcacagccatagcaaaacaggatctgagccacatctgtaatctgcgccacagatccttaacccactgaaggaggccagggattgaacctgcattctcatggacactatgtcatgttcgtaactcactgagccacaatgggaagtccctatagatccctctgagatctggccataagccatcctttcacaaccaggtaccctgtctccctgggtaccagtgatcacagtggtgagttatgaaagtgggaacgggatgtgaagaggaaaacccagtctctttctggggatttacctctatcagctcacgagttcttcacactttgccaggtaagaaaggatgggataccaatgttcattgccgccctacacacagtagccaagacgtggaagcaacctatgcatccatatgcagaggaatggataaagaagatgtggtatatacatacagtggaatattattcagccataaaaaagaaggaaatcatgccatctacagcaacatggatggacctagagattatcatactaagtgaagtaagtcatacaaatttacagttaaccaaggggatagcagggggtggggaaagataaattaggatttggggattagcagatacccactgccatatacacaaggacctactatatagcatggggagctatattcaatatcttgtaataacttataatggaaaataatctaaaagtaaacatgtatgtgtgtgtgtgtgttcactttgctatacaccagaaactaaaacaccattgtaaatcagctataattttttttaagggtttgggagttccctggtggtctagtggtaaggactcagcactttctccattgctgcccaggttcaatccctgatctaggaaccgaaatcccacatcaagctgctgcacaccacagccaaaaaaatgaaaaaaaaaaattttttttgtctttttgctatttcttgggctgctccagcagcatatggaggttaccaggctaggggtcaaatcagagctgtagccaccggcctatgccagagccacagcaacacaagatccgagccgcgtctgcagcctacaccacagctcacggcaacgctgggtcgttaacccactgggcaagggcagggatcgaacccacaacctcatggttcctagtcggattcgttaaccactgcgccacgacgggaactccaaaaatgaaaatttttttaaaatttttaatggttaaaagagggggggaatatcagccactcttggccccacccgcatccaccttgccaggttagcatcctatcccccgctgtctcactagccttgaagcactgcctgacacatccaggcatgtaacagcacagcctccgagcaggtgaacctctgtggtataattcacactccagagctcctcctgggaccaggctgcggctgaaaatctcctgaaacaccttctgagtggccatttcctcctcctgccccatcctgcttccctccctgcaagggtctcctgagagccctccctcaacaaatgagtcacataaaatcctcatctcaggctttgcttctccagaaatgaatgaaaaacaagtggcgatccttatttttgtgtttcagttttgttttgttttttcaaattttgaaggtctcctgtggtgcagtggattaaggatcctgtgctgtcactgcagcggctcaggttgctgctgcagttggggagttcaaaccctgacccaggaacttccgcatgccatgcatgtggctaaaaaataaaatgttaattgaaggcacaagggaaagagccagggtgggaaccaagagacctgatgttatcccttgttcggccaccatctcctagcaagtggccagctgtggttcaacctcctgggacacaagtctcctccccaccacattgggcatatgcattttcctcgtgcaacttacactgtgccattgactccaacggagataacgtgaatattacccagctgtagaaaccacaacaccctgtcggaaagaaaaggaaaacaccatgaaacatcaagaagctctttagattcaacctgaaaaattacttctggcacggcttcatggaaacaggtttggggagcctagatgaaagctgcagctgagtgatatacgttgttcaatataatctgcacaacaaccattcctgcttttctgcatgtcacttctgtttttcattctgtttatattatcttcattttcttttcaaagagttctagctgattttcaaaaatatgcatttaagtatgcgtcctcaaagggaacgacatctctcctaaaagggcaaaactggagttcccgtcatggcgcagtggttaacgaattggactaggatccatgaggttgcaggttcgatccctggccttgctcagtgggttaacgatctggcgttgccgtgagctctggtgtaggtcacagacatggctcggatcccgcgttgctgtggctctggcgtaggccagcggctacagctctgattagacccctagcctgggaacctccatatgcggcaggatcggccctataagggcaacacgacaaaaaatcagagaaaaaaaaaagggcaaaacttggttcttggggaaagatgaaaaacattgtactcttttatatacaagacacatagatatacatataccatataaataaatacacactatatctgtagtattattttttttggtcttttgtctatttagggccgcacccacggcatttggaggttcccaggataggggctgaatcagctacagctgctggcctccaccacagccacagcaacaccagatctgagctgcaactgtgacctacaccacagttcacggtaatgccggccccttaacccactgagcgaggccagggatcgaacccgcgtcctcatggatgctagtcttgttcatgatgctagtcttgttcattaaccactgagccacgatgggaactcctgtagtattaatttttttggggagagtaagacaattcattttttttaatgtctaaaaggcagcccagtcccccgtatttagttcctctccaactacatcatcatcatcaccctcatcatcaccatcatcttcagcatcaccatcaccagtctcaccagcatcttcaccaccaccatcatcatccccatcattatcatcactgctatcaacctcatcattatcttcagcatcaccatcatcaccaccaccatcatcattatccccatcatcatcatcaccatcaccagtgtcatcaccaccactctttgtttcttgcgggcagaataaagagtgctaatggcagggagttcccgtggcgcagtggttaacgaatctaactaggaaccatgagattgcaggttcgatccctgggcttgctcagcgggttaaggatccgcgttgctgtgagctgtggtgtaggtggcagatgcagctcagatcccacattgctgtggctctggcgtaggccggtggctacagctccgatttgacccctgtcctgggaacctccatatgccgtgggagcagcccaagaaatggtaaaaagacaaaaaaaaaaagagtgctaatggctaatcccagtgctgacacccccaaagaaacaaggccacaattcaggatttggggtccacagtcacctgctctttctaatgaaacctgccactcaacaagtctcacaaacctaaacttccaacttccctcagtatcactaattgaaatttctcttgctctttagttattttagaggcaacagagcatcatgtttaagcatatcaactctgacatcacatgtttggtgtcaaaatctagcttcaccaattacagactgtgcggccttgggaaagttacttaatttctttgtgcctatgttttctcttatgtgtaataagggaaacaaatccactgtacaacagctgaggaaacccacacttgttgcttagaaaaggtctcctattcttagatttgaaccaatgatgaaaactcacaagacccatgaagggaacaatgacatgaaaaaagcaagaccaagaaaaactgacacctgaagaaaaagaaataaaagaacaggaaaggagttctcatcttggagcagcagaaatgaatctgactagtgtacatgaggacgtgagtttgatccctggcctcgctcagtgggttaaggatccagcgttgctgggagctgtagtgttggtcacagatgcagcttggatcctgcattgctgtggctgtggtgtaggccagcagctgttgctctgattcaacctctggcctgggaacttccataagctgtgggtgcagccctaaaaagaaaagaaagaaagaaagaaagaaaagaaataccttccctggtttcctccttctatataacccccgatcacactatacgacagcttctttcatagctcttatcacccctggaatgccccgttttatatattcttcggagcagcatagtttaggaataaaacatacagactctggaaccaggctggctttaaaaccctggctctactcccttattacataagtggtcttgggcaagttattcaatttcttttacctcatttttttctcctttgtaaaatgggactgtttcaggacccaatatcagaggaatttagtgaagactgaatatgttctctatttgaggaacttagaacagtgctaagtgagtggttgctattaccgttagtggcttcctttctgcctacctcttcctgctggtaagtcagcctcacagggcaggaactttgtctgttcactgctctatcctcagtgcctagaacggcagctggtacacggtgggtgctcagaaaatacatgccaaatgaaggactataaagaaattctttcttggcagatgaattccctgatttttatcaaagctttcctgatgaagatgtttgcagtgtccagtctagaattatgatctcttggctggatagcccaaggccctcccttttccctgcagcctatatccagtgtaatcttcccccggactccctagtcagcctcatactcaccccaaaagagaaggaaactgaagctccacatcttgctgtgtttctgtcattcgaagaggagaatcttttctctgttcccagagtttttaataacagagggtgtggagagaggggaagggcagagccagcattgctcaatgcaaccagagcatcacagccctttttgctgagttgccaccactcggaaaggacagtgtagcaaacccctaattttctcctttctccacagtgtagagaggttggtctggctggtgggtcagtgtgtggatccatctccctctctctctctctctttccttcctgctggattctttctttcttttttttttttttttaattgcagcatagttaatttacaatgtatacacatatatattctttttcagcctttccattacaggttattataagatactgagtataatttactgtgctatatagtaggtccttgttgtttatctcttttatatacagtagtgtgtatatgttaatcccaaactcctcatttatctcccccttccactttgttctttccccaccaacatctatctcccatttctcatcatcttattttattgcacccagtaataaatgagcttccaccatctatccccaatgaagcaagagcaaaactcaagggtcctttcccagttttccccgtacaataaccaccataaacctcaagtaccaggcactgtgctaaatatgtttccaagaaaatttaatttcatcgccatgtcagcatcatcaagtagggattcctacccctacctatctcatttaaaaatacaatagaatggaaattgcaactaccaaccccaagctccctgtcaactattacatttagaatggatgagctaagcaatggggtcctggctgcacagcacaaggaaatatgtccagtctcttggaatagaacatgacggaagacagtatgaaaaaaagaatgtatatacatgtatgtttgggtcactatgctgtgcagcagaaattgatacaacgctgtaaatcaactacactctaataaaaaataaagaaagaaaagttaaaaataaagatgctagaaacaaaaaagaaaaaaggaaactgaggcttggagagaagatgtgtcttgtccaagactacctggacttgagatttgaatccaggaccctctgaccccaaagactagaactttcaccattttgtttgccttcagctccccataatatctgatcactgtcggtgacactcccactccatcccccctccccaagcccaaccgaagacacacatacacatgcaacttctcataaacagggtggcctaggaatatcttagttagggtctcccagatgcagaggctgagacaaggcgtctagtgaaagcagttcatcagggaggtgaccccaaaaacgctccagctgaggatgggagaagtgagagaaggaaggaaaagagcccacaatgaatgttatccagtaagttacccagtaaaaaactgaaactgaaacagaggttgaggacatctgtgctatgtagtaggtccttgttgtttctctcgtttatatgtaattgtgtgtatatgttaatcccaaactacctaagagacagcctaaagcaccctcttcagacttatcccaaacgaggcgggtgagggagctggggtatttatccaccagatgctgtcggtcactgattgaggcttgtgttaacttaagacctggcctccaagcagatagaatgcgctccagaccatagccctgttgatgacaaaatgcagtggctggcagatgtcaggctagggcacccaaatcctgtgctccaagataaaacagaagggcaaagcccagccctgaggtcttgggaagaagagccccatttgttttcatattctcctttttcgctctgggcaaggcaaaatacctaccctggaattatggtcaccgaagaagattcatcaacagctccatctgtggatcaagagaccctatccagtgaagctgcagctaagaacgagcacgaaaatacagcaaagccctccaagaaggaggataaacagagctgtgttacatttaagagacacactggtggatcaacacagaccctagcaccagatcgcaggggatttaaatcccgactccaccacttgctagtcatatgcggtcctgggcaacttcttaatgtctctatgcctcaacattcccatctgtaaaatggggctgataaaaggagaatctatttcatggagttaagatgagcatcagaggagtgggtatatatctcacgcttagaaccaagcctggcacatagagaaaactccaagatgtggctattactcaaattctttgatatttctcccttccagagggggaacccagtttttctctccttgaatatgagctggactcagtgacttgcttccaaggaacaggaaaaggaagatgtgacgtgtggcctctgaaacatctgaaagtcattgtggcttccccctcgctcttactttccaggatcattcagttgggggaagctagttatcgtattgtgagttcactcaagcagcgtgatagagaagccctcatgaggaggaactgagattccagccaaaaccttgactgtgacctcataagacactctgatccagccccacccagctaagccacctctagattcctgaccctcagaaactgtaagaaaataaaagtttgttgtttgaagctgttacatttggaggagagatgtgttacactgcaggagataactgatacgcttagaaccaattgtccttgtcaattaaaaaaaggataacaataacatcataagagtttgaggtttgctggaataaaaccttaaagttctacctggcaaaataatgcccactaatatcagtaattcttgttattattattatcccattaggctaagtggtcacagctactcattggcatctgttcctgggtaccagcaaggacagaagtcagcaacccatttcatgcaagaccatctaatgtgggtgagaaagtttagactttctctgctgggcaataaagggatttcagcaaaggagtaaccatcctgttggtagtttacaacactcgtgttgtgtagacaggatgtggtcatgggtggggagatggggagaagaacatagcgacaagctcgtctagggcacgggttgtggagacagagaggaatttaggaagcaggaaaagcagaatggggggaatgcatgcatgtgggtgggggagtctaaagcagaaggaggaattgacctctggacattgggctacagaattgaaagttcttcccatccggcccaggctccttctcggggtgggatgggatgggatgaaatggtggaggagttttcccgctactgccaaaacaaatcgccacaaacatatggcttgaaacaatacaaatgcaatacacgacaggtcgggaggtcagggtccccgatgagtcttaggaggctgaaatcaagatatccatgggggctcctagaggctctggggagaagtccattccctgtctttgacagcttctggaggatgcccatattccttcgcattccaaagccccttcctccatctgcacaggcggtgtagtatctcaaaatctctctcctctccctctctctctccttctccctctttctccctctctttcactctctctcccttcctccctccttccctctctccctctctttctctccctccctccctcctctccctctctcacacatacacacatacaaacacacacacatttgctccatggatggatggatggataggtaggtggattggtgggtgggtaagatatagatggatcaatggatgaataaacaggtaagtagatgtgtgtattatgctttgatagagagagagagagattgctctcattctctagatacatttctctcattctctctatcctcaatttctctctctcccccacctctccctcccctttcctctctgaccctccctccgctcccttaaaaggactttgtgattccattagacctactcagataatccgcaataatctcctatctcaaaatctttaacttcactgcacttgcaaagcccccttggcagtgtaaggtatatatgtacagctttccaggagtgggatatggacaacctggtgggaattagggggaatttcattattctacctactgaaggtggggtctggggtcctggtgcgtgactgaggatggcaagatgccagtcacccttcaaatccaaaagaggtgaccaaggctatgaactctggaccacagagatcctccaggatgagggcaggtagcaggcgtgaggggagaaaaaagggaaggaaatgcacaattggagccacatggcttgcagaagcctaaccccttgtgactttcccagcaaagaggaaattgagagatactcaagaagtcatctgagggtgtaataggaaagaacaaatctgactccatattagacctgttccttttactttaacctttgtgtcctgttgttttccctgaaagaatgttacctagagcctgaaattcatcccccagcctgcatagtctcaagcctctgacctttaagagtataacacgtttccattcacatagagataaaaagttgcagaacagagaattacatttgttttgttggaaccttacaggaacatcggtgacctgacctatgcagacaaaggactcctgtaccaagaaggctgcgacaaccaacctgccctgccccacttcccctggcctttaaaaatgctctgctgggtattcccattgtggctcagtggtagcaaacgtaactagtatccttgaggactctggggttcgatcccccaggcctcacttagtgtgttaaaggatccagcgttgctgtgagctgtgggataggttgcagatgcagctcagatcctgcgttgttgtggcaaaggctggctgctatagcttggattcaactcctagcctgggaacttccatgtgccctgggttccgcctgtggaaagtaacataatgtcttttctatcaaaggaaatcttggttactccattttgctcaggtttcaccttcctgcgaccccccccacccctcccctttccctcttctcccaataacaatttgtttcaaattagccagccgggaagaatgtgcaccctgacctgaccaatgggaaggggacaggtacatcacctgcgttagggataaataggggagggtcctttgttcggggcgcacactttttggagtggctgtgcccttctgcagaagtaaagagccttgtcgagatttctccttgtccatgtgtctcactttctgacactgacgacccagcccgagctagagttattggaatttccaacaggccttaaaaaaaaaaaaaaaaaaaaaaaaaaagacaataaacatgctttgctgaaaccctttgggaagttccgggtttggcagtggcggggggaggtgcatgagggcccttcccctccagcccccgcccaagtctccttgcacagccctgcaataaacctctctctgctcccaactcccctgttttgtatagtttggccgcactgagcaacaggcacatgatctgagttcggtaacagagaagcccggccccagagcatccctgggttcatgcttaatgagggtgttggaggaagggcggctcctgggaagccctccctacccaactggaccgtgttcctctctcgttccctctaaaccctcccctggctccctgtgaccttcgggatgaagtccagtctcattaatacgacactcaagacctcactgagtcttatactggtgcccttcttccttattgccccccctcacaagtcccagtcatcccaaatgaacctgcagtgcacactgtcgctgacctgtccagccatccttcagctactggagcaccatccccccgctgctgcgggtgttgcctgctaacagttcacagcttccccttctccagagaacgttccagttcaatgcctgcataaaccctcaggcccatcctgcagccaataagcaatgggcacaggggtcaaaagccagcgttcaccccaaggtgacttcaacttagtggtgttattcaggctccgggtgttggaaattacagtaactctggctccggttgtcagtgttggaaagtgagacacatggacaaggagaaatctcgacaaggctctttacttctgcagaagggcacagccactccaaaaagtgtgcgccccgaacaaaggaccctcccctatttatccctaacgcaggtgatgtacctgtccccttcccattggtcaggtcagggtgcacattcttcccggctggctaatttgaaacaaattgttattgggagaagagggaaaggggaggggtggggggggtcgcaggaaggtgaaacctgagcaaaatggagtaaccaagatttcctttgatagaaaagacattatgttactttccacactacccttcctcatcctctgctaaatgtcctctctcaataaaccctgaaacaaacatcctcagggcagagtctgtttccagggggacctaagaatccctcccagccattaaactctaagctgtctcttgacctcaggttgcacatgggtactcactccatattgtaggcttccttcccatgtcaatatcacctcctcttccgtgccttcctttgtcaatctcaccgcctctaggaagccttcccacaaaaatatcacctcccccagggagccttcccatgtaaaatcacctcctccaggaagccttcccatagaaatatcacctccagaaagccctccctgacctctccttcaggattagggacttcttctatgctttcctaatcccaacacttaatatgatctttgcttgtttctggatttgggggtgggggtatgcttgcttttggttttttctggggtttttggccgcacctgctgcatacggaagttctcaagctaggggtcaaatcagggctgcagctgtcagcctacaccacagccacagcaacgccagatccgagccacatctgcgacctacaccacagctcatggcaacaccagatccttaacccactgaacgaggccagggattgaacctgcagcctcatggatgctagttggatttgtttcctctgggccacaacaggaactcctgaaaaaactaaaaatcttaaaaaaaaaaaaaaagaaagaaagaaagaaccaatgaggaaaaagaagaaggaactgaagaatctcctgacatccccccctaagccctcagaaccaagaccaagaatgtaaggggatggccgatgggcagccactgccctccccctggaaggaaggaacacgagttctgcaaggggcagcacttgctgaggggcagagtcccagcttgctgggaaggatgcatagttatccaggctcctaagacccctggcaagtggagagggggggttgttgaaattcccctagaaccacacccaggtcaaagattccccaggatggctacacaactcagtgcatagccatcctcaggctgctttattacagcgaaaagatacaaagcaaagacacagaggaaaccaaaaatgaggaaagggttgaaatacatacaagcttccagcggagaggttcccaggagaatggaagaagcagcccccatccatcaattccttttgctgcgctgatctcggtatgagactccgaccccaaccatcctctcccgttgtgtgatttttttcctttcccctataattttccctgccatgccacccctcccccaaattgtgtgaccttcctttcattgtccttgccacaagttcccaccatgaccctttacaagagtaacatctcaggcgttcccgtcgtggctcagtggctaacgaatccgactaggaaccatgaggttgagggtttgatccctggtcttgcccagtgggttaaggatccggcgttgccgtgaactgtggtgtaggttgcagacgcagctcagatcctgcgttgctgtggctgtggtgtaggctggcggctatagctccgatgcaacccttagcctaggaacctccatatgccgcgggagcagccctgaaatgacaaaaagaaaaacactaaagtctcctcacagttggagctgctactctcttgagctcagccctttggttccggaggccctaataaatctctcttcttgactgacttggccttgggcgttcttccttcgagcaaacctaacaccagggtggcctggaaccagaggggcagggcgggagggatcacaagagagctccagaaaatttagggaaacaatggaaatgttccgtatcttgagtgtggccaaggttgccaaactcatccaatttttacactgagaaacgaagcagtttgttgtatgtaagtcaccctctcgtaaaatggataagcttggctccaaaataaaagaggacccagcattccatcaaattattttcttgtgcgtgccacatgaaaggacccagttgtgttattgtgcaggcaatatataaagggaccagtttattttatgctatataaaagggaacaaaagatgggcattttgagtttctccagggaggtgtgggctcttttacatttaaacatttgggttttttcgttttgttttttttttttttttgcttttcagggccacaccggcggcatatggaggttcccaggctaggggttatttcagagctacagctgccagcctacaccacagccacagcaacaccagatccgagccgcatctgcgatctacacccgacagctcacagcaacactggatccttaacccactgagtgaggccagggattgaacccacgacctcatgtttcctagtcggattcgtttccactgcaccatgatgggaactcctaaacatttgtttaaatggatagcttatcttattccacaataataaatacatttgaccttaagaagcttaggaatgatctaaatctatacttccttcaaaattaaaatgaaaccaaaaaaaaaaaaaaaactagtacagttcacatttcctaactgcaccctgacagataagaaatgtttcttagaataatgccatttgcagcaatatgggtggacctagagattatcatactaagtgaagttagtcagagaaaaacaaatgtcatatgatatcacttgtggaatctcaaaaaatgatacagaaaattccttcgtgattcagcaggttaaggacccagcattgccacagctctggcatgggtttgaaccctagcccggcgaactctgcatgctgtagttgctgcaaaaaaaaaaaaaaaaaaaaaaaaaaaattaattaaaagaatattttaaataaagtgttaaatgatataaattaacttatttacaaagcagaaatagactcactgacatagaaaacaaatttatagttaccaaaggggatagtgggggtaggggggagataaattagaagtttaagggttaacatatacacatcactatatataaaatagatcagcaacgaagacctactgtataacttaaactatattcaacatcttgtcataacctataatggaacagaatctgaaaaaggatatataaacatattatataagtgaatcactttactgtacacttgagactaacacaacgttgcagattaactatacctcaatattttaatttcactcacataccctgccctgggacttactaactctgacgaaggcatccacaggtgatattggtggacatatttcaaacacagccaggcagatatggcattgaatcaaacaggggcctttataaacatctctttctctctttataaacatctctttctctctctctctccacccccccaacacactctcaaacacgcgagagcgctttccaacgcagatagcaccaaagtaaagccaagcttgccctctggtggacagtatcagtagtgtcccaaactgctgggctgatacttggatcccagcttggtgaaagaagtagagagagagagagaaagagagggagagagagaaagaaaggtgtatctgtgcacctgagtttgttcacaagcctatatatatgagcccatatttgggcaccataaagggcccctgatgcttatggctttgtagcatcctcacactgcccagtggtatctcccattcattcacccaaaagcacagagaagggacttatagagtcatttcagagtcttgttggacacaagcagtcatagcctcatgtagccaggatggggcaagaggtagaaacacagagctggaggaagctagagggagagtttggatctaagtctctgaagggtaaacatgggcctatactgttgcaaaggcagagaaacctattgtagatggagtgggctctactcaaagccttttactgtagcacaaagcctcttcttaattctttaatcccttccagagggctaggtttgggctgttgagttagtacttggtatcttctagaagagaaatgagtgagccaaagaaatgactctctaatggtggaatgacaatgaagtcaggcatagggcagattttctttctttttaaaaacagttttttgaggtaagactgaaacatacaaattgtacatattgagtgtatacatagcgataagtttggggatacacatccacttgtgagaccatcaccaccatcaaggccgtaaacatacccatcacttctcaaagtttccttctgcagtggattttcattttggggtcccatcacatttcatggggactgttgacttgaggaaagtctgttctcagggagccagcactcctgtttgagttgcgggggagtgtctcaggtcccatgaaatattttccccgctgcctccaaactcatcagtttgaagctgtgtgctgctctctagtggccaccgctcatttggctctaagctttccgcatagattgttctgggaccagactgaaagcgcaggctccaagtcaggcttacaactttgagccttaaattgcaggaggtggggagccatggattaaggagacttaatcagtggacaatttgaggttttaatcagtgtggccatttcacacttgacctggcagatttccattcattagtatcatcacttggtctccagtctctcccatttccaatctattctgcaaaagcacaacccaagtcatatagtccaggcagcagattgaatccttaggatgacccacagggacttatgtaatttgcatcctcctcttgatctggctgcactgacctctggaagcaggaaagggcagaagaaaaagctgagcaaatatgcgggctcagcttgagtttacttagaattagtttcatggcgaaaattagtgtagaggagcaaggtagagagtatcttgatggtggtgggtggttattattgactatgtggtcagagaagccatcttggacatttgagctgagaccttgagtgaatggagagagtgcccagggaaaaggggggaggagaaaatgtgtgttaaggcagagggaatagcaggtgccaaggctctgaggaggctgttgagtcagtaccctgtattttctggaagagaaattatttagcaaaagaaatgactctctaataatggaattttgggcaatgaagtgagacaaggaacagattttctttttctgttaaaaaccattnnnnnnnnnnnnnnnnnnnnnnnnnnnnnnnnnnnnnnnnnnnnnnnnnnnnnnnnnnnnnnnnnnnnnnnnnnnnnnnnnnnnnnnnnnnnnnnnnnnnccagcccgccccgggccctgggaggggaagccacccgaacgcctcaaacctttgctctggaagccccaggaatttttccccctctcctagccgggatatatgacccctcctctttctggggtggtggtaatcctgggttcctgggcgccctggggtaactagatagcccctcgtgccaactctgggatttcttttggaggtgcagtggagtcagtgagggaaaccaagtcacccctcgggggggacccgcggaagcatggcgaccgggagaacctggtgcctgctctctggccgttctgggggccccccaagctgcggggaaccctgtccctctggccctgactcacgccgggccggccggattttccggaatctgggggggattaggggagccggggcagggggagtggccttgccccattccacacccctgttggacgtctggagaggggacactgtagtccggctggggccccgcccctgttccctggcccttcctgggaaggggagggggttcccgccggtttcctgcttccccccaccccacgccgctccggggcggggccgggaagccactccttctgggagctcagagcttggaggctcccctgggccaggtcagcgggctgtggggtcccaaagtcttgatcccggtcctcccaatcccccgctaggatcagtttgaggtgcttgagcggcacacgcaatggggtctggacctgttggacagatatgtgaagttcgtgaaagagcggacggaggtggagcaggcttatgcaaagcagctgcggtgagaccctagggtggccgcgccctgggcttcgggggagcggttggagggctgggggctcagtcttcctgcctctctccgtaggagcctggtgaaaaaatatctgcccaagagacctgccaaagatgaccctgaatccaagtaagaatgaagaggggaggcagagttagatttgggaggactggggtattggatccttttcctctccctccatttgggccacccaagcactcctggcttctccacccagttccacttagaggtatgagctgggaaccaggaaccgtattacctgggttggaattcaaaatccactactttctagctgaactgctttgggcagttgactccagttctccgcctccatttttcttgcctattaaatgggagaggctccaacagttattaaatgaatgactctgagcaagtgacttaagttttgtgcctctgtcttcctcactgtgaactggggatgatgatcacaatactgatcataatgataatgaccttgtaggggctcatttgaagattaagataatgtgttaaaacaatgcccagcccatttcactttattccaagcccccagttccagaatccccaaagctctaagaatcagaagcttttctgggcacctatccagaggcaacctctgacctgaactaatttgacattaattacattaattgcgttcttggtttttatcccactgagtgtgaatgttaatacttatcattgagagttcccgttgtggctcagcaggttaagaatctgactagtatccatgaggatatgggtcagatccctgacctttctcagtgggttaaagccctgtgttgccatgagctgtggtgtaggtcacagatggggcttggatcctgcattgctctggctggggtgtaaggcctgcagctgcagctccaatttgacccctagcctgggaacttccatatgcctcaggtacagccctaaaaagagaagaaaaaaaatctcatacaaaaatgtttattagatgctgccactaacaccactagggtaatgtgaaaagtgatataagcatcatatcccccttctgaacccccctcaaaatcctgagaattctgagttccccctcagcgggtggggataagggagattggttagaatttatcattgcttctgggtgaatgttttggagcttacactcttctggggcatatggcttccaagggccctgacccctagcccctgcccccttccccccaccccaggttcagccagcagcagtcctttgtgcagcttctccaggaggtgaatgattttgcaggccagcgggagctggtggctgagaacctcagtgtccaagtatgtctcgagctggccaagtattcgcaggagatgaagcaggagagaaagatggtaggtgatgccctccttgggacttccccagggccctggccaccaggctgagccttattacccccttctttctgtagcacttccaagaaggccgccgggctcagcagcagctggaaagtggcttcaagcagctggagaatgtgagtttgtgcatggggagaagaggggcacccctgagcagtggggtgagggtggctgatccatggaggtacccccttggtctggcctggtcccccaccttcattgtgggtttccccctccatgtgctgggtgacttcccacctgtccctgaaaccttagttggtggctccttcatgccggtcctgtcctctacacagagtaagcgtaaatttgagcgggactgccgggaggcagagaaggcagcccagacagctgagcggctggaccaagatatcaacgccaccaaggctgatgtggaaaaggtgcttgtgcggtctgaggcaggcttgggggggggggggggcagggcccgaacctggcagtgacccctgctttcatattcctcaggccaagcaacaagcccaccttcggagtcacatggcaaaagaaagcaaaaatgagtatgcggcccaactccagcgcttcaaccgagaccaggctcacttctatttttcccaaatgccccaaatattcgatgtgagtattcaaaacccacagccccacctcctccccaaattctaaaattaaccaactcctacacatttgttgaaaccccagctgcaatgccctaatctctaaattgaaagagaattagaaatgaagagtcacagtgcactctgccttttctcaagctattcgttctgcccgggttgtctttctttccttttaaaacttccatttattctttcaagccccatcaattaacccctnnnnnnnnnnnnnnnnnnnnnnnnnnnnnnnnnnnnnnnnnnnnnnnnnnnnnnnnnnnnnnnnnnnnnnnnnnnnnnnnnnnnnnnnnnnnnnnnnnnnttcctgccttctttgaaatcacctccgttaactatacctgactcccatgagtgattctgccatgcacatgtccaatctctctctctccccacagtagataatcaattccaggagaacaagtatttgggcctgtatttctcactgctgcatcctccatccctagaatctgggcgggcatacagtaggtgctcaacaagtatttttgaatgagtgcatgaatgaacgaagaaatgaatgaatgattattggcttcagctttgcaactgaactcagctgagactcactcgaacgcctctcccacgaatgctgtctgtgaaaacagataggacctgattcccccacagacccctgcacctacctctacacatctgtcccgggccctggacactcgtctttcccctgctggattcaaatccgggcttgcagacacaagagtagctccccacactgtttcggcaaatcgcgtgctctgggcaagttttgggattggcacattcatttacatctagtgaatgggaatgaaaacccgggtcaaggcagaggaaacagtgaggacaggaagctgcgaacaggacattcatctcacccacaagggtaggagcgaagcattcgagggacggaacccccgttaccctcaattactgccttatctactgcttagctcctaatagaccctcaacaagaattcaaatccaagtttctctacttgatagttatctatccttatgcaagggactgtacctctctgggcctcaatttaatcatttctaaaatcaagatcatagacgctacccataagatcatcacatattacctgtacagatgaaacgacctttctttcccaagatccagttgtttccagtgggagatgagaaaccagtcaaacagctgcacctgtacctccctggcaggtcttgcagattgagtgaggaccacatactggggggctttgagaacactcatctatatctggacaggaaaagagagtcatagttgccaatatgctccttcatgtacaacagattgtatttttcaaagagcttgaaacactgtcttccatcccatgtgacctgcatgcaatgtcctttaactggtacactttccatcaagcagtgggtctatatttccttcccttgaatctgagtatggtggtggggacattaggtcatcaaaataccatggtaaatcatcaaaatatcatacacttccaccttgttctcttgagatgctcatgcttggctcagccgccatactgtgaggaagccttgcaagtcatgaaaaaccagctcacacggtaagattaagacttcccactcacagccctggagcagccaaccaatagccagcaccatcttgaagccacaggagtgagcccccttcaaagagaatcctctagcccccagttgagccaacacaactcacactgtggggaacagagttgagccattctcacccaactcagcccaaatagcagatttatttgtgagcaaaataaatgattgttgctgtcttaatgtaccaacaccaatagataaccagaacttttgcaaacccacttctaggaatttactcattggcgcacccatagaattgtgcagccattgtaccatggggtgggcctccccaaatctccttcagccctgctctgccaagtcatcctaagtaaacatttgctttgaagttgctggacaaatacaacttcaaggcaagcgccctatagctctcttccaggaaaatgcacctctccaagagagaaatctggacctgccacatgcatcaagataagatcacagggatattcttcccagttttaagtaatggaacattaaacatctaaatgtctgttgataataggatgattaaatcaggagttgacataaagaataatgtagcatgttccttcatttgagaaatatctattgaatattcacagtgtcttaggtaccatattgggagtcaaagacatgcagtggacaaggtccttaccatagtatccatcattttctagttggggcatgttgattctacctgtattttattttattttttgctttttatggccacacccacagcatatggaggttcccaggctaggggtcgaatcagagctacagctgctggcctacaccacagccacagcaacgccagatccaagccacgtctgtgacctacaccacagctcacggcaacactggatccttcacccactgagcaaggccagggatcaaacccacaaccacatggttcctagtcatataatttctgctgttccatgacaggaactcctgatcctacctgtattttaaaacgagggaccaaaaagactactgtgctcactgaataatccatgaacgatagcccaaaggtttaaaaaaggatgtttggagctccctaggaaatatagtaatagatattaaatcatcttattcagagattatcaaactacagcccaagtgtgaaatctggcccactacttgtttgtgtaaataaagttttattggaacacagccacatccattcatttatgcattatctctggatgcttttgcattacaactggagtgttgaataatcaagacctccatatcatatggcctgcaacctccaaaatgtttactatctggccccttgcagaaaaattttgcggatccctggtcttattcagaaacatagtcagatcttcactgttaaaaggaagtttgggtctaaatataaggaatacatatcaaaaactagctcattctgggtattattttagcttatattctttatgttaactgtagctcttggcactctacatgtgccaagcaggttgtatacattattgcatttaattttcccaactatcatttaaggtaaatacttctttctctctctctctctccctctcggccaccctgtgccatatggagttccttcgtcagatcccagccacagttgcaactcgcacagcagctgtgccacaccagatccttaacccactgtgctgggctggggactgaatttgcatcccagccctgcagagacgctgaagatccggttgcaccacagcagaacccctaaggtagatactcacatacacccattttatagatggaaatattgaggcttagagatattaatgatgtttctgcaacgctttacaactgctgtgtggcaaacaggtaatgtggtttggagaccgccattagagtcggaaagtcccgggtttgcattccaatttaactgcatgactctgaacacatcacttcagatatccaagcctcaggcttctcatctgtacaatggaggtcctagcaatgcctatgctcaatgtcatgtgaacaggcacataaagcccttcacacagggcctggcactccgtacaggttaggaattcatattattcacatggaaggaaatcaatgtctatttggggatattggcaaatagcatctttttcttttttttctaatgcaagtctctaatcgcaagaatttttgctggccaggtatcatttctcataatcaaaacgcgttgtcccgggctaaatgtctgcaccagactgnnnnaccnnnnnnnnnnnnnnnnnnnnnnnnnnnnnnnnnnnnnnnnnnnnnnnnnnnnnnnnnnnnnnnnnnnnnnnnnnnnnnnnnnnnnnnnnnnnnnnnnnnnagaagccgagagccgggtcctaagcaaccgaggggacaccctgggccggcacactcggcccccagaccccccagccagcgccccgccagacagcagcagcagcaacaacggatcacaggataacaaggagaggtgagcagggaggccagagtgtgtgtctgcatccaggcccaggagtgatggggaggggtcctgtcctcaccggctttgccctctccaaccagctctgaagagccccctgcagaggagggtcaggatgctcccatctacacggagtttgatgaggattttgaagaggagcccgcatcgcccataggccactgtgtggccatctaccactttgaaggtaaggacagcctgggtggcgcatcggtggcttcggggatagcatttttggctaggctctgtttaggttcaccttgagcagatctgagcccaccgccacccccaccccatgacagggtccagcgagggcaccatctccatggccgagggcgaggaccttagtctcatggaagaggacaaaggtgacggctggacccgggtcaggcggaaacagggaggtgagggctatgtgcccacctcctacctccgtgtcacgctcaactgaaccctgccagaggcgggaagagggggggctgttggctgctgcttctgggccacggggggccccaggacctacgcactttatttctgcccccgtggcttcggctgagacctgtgtaacctgctgccctcccccccaccctgccccggagcccccactcaagggacccactgtgccttccaccatcgatgtacatactcatgtttcccatcttttcttcctgccactcggctggggccgttttgttttatataaaacaattatgaaaagctcttacagtctgtgtcctattacgagattctgatactggggctggagattcaaacaccaccctcccgacaggtggcaccaggaaggaggaagggaaggcgaacttgggcacacgttggcatcccctgtcccttcctggggggttgggtgtgttgatagggaggagggtgccagatgtcacccctttggtgttctgctatagctcactgagaacaggtcacacctgttgagcccctactgtgtgccaggcattttccacccatgatctcattcaaacgctgagctttaatccccatgacaacccctggaaagtacacagtctcacttttatgttgaaggcggggatagagagagaggtcaagtgatctgctggaagtcacacagcatttaaaatggatttaaactctggcctcttacagatctgcgagttctctttaacattcaaagcctcacattcaccacttgtgggatatgttgaggggggtgtgggcatggggtggtgagaaagggcgttcagaacctccagatgtcgggtcttctcatatggggaagtaggctgccctcccttaggattcgtgctcagttttagggtgcagggtgcgttcttgcaaaccaggacccgtcccttctgtgaggctgggtgcaggtcccactgcatttggctgcctgaggacactggggatccctggaagactgggtatcgccgcgtgaagaagtggatctgtgctttcaaaggtcaggctccaggcgctgcgacaggacactgaggacgtgctggaacttgtcgaaacgtgtgacccacggtgccccagcccctctgcttccccagagcagcctccgcaagaaaccggtggtcagggcctctttcagctcagggttgggctggaatcctgggggcggagccaggttagctggaggcgtggccaggcacctgccttaccctctgataactgcctggtccccttgggactttgacccagcaggggccaggagggattctgtcccaggttatctgaactgctgggcaaggttagcggggagggggctcctgggtctctgcagggagtggggtgggggtggctaacgggcccagtggaagcgggctctgccaggagtgcatgggagcagtctgctccaggtgcaagacctggtggccccaccttagggcttgtgcctggagatggagctgccccggggggcgggacttggggtccaggctaccctacgcgacaaacgcccagggggtgggggtggagttgggcctagttggagggagaagagtgctaagtgaaggcaggaactacccaggtgggagattctggaagctgggctgccccagagaggtgtggctctgagctcagagggagagcagtaccatcaggttgaaggactgaatcattttggggggatcgagatcctctgggggcaggaccttcccaagtgtgagagagtgggactctgcgggcgtggctctggggggatagggccgccctttaggggcggacggcaccatctggtctattgcagcatgcttgagtcgagaaacacccacccagggcggggccgtctcaatttgggtggggccctcagtttgggaggtgtagcgggaggctctagtccctgggccggtgggtttgggggtgccgggctacagcatacggcgtgttcttaaagtcaggatcctctggcagccgggcgcagatggggcgctcacctcgcaggcgccgggctgtcgcctcgcggaatctgggcgcgtcccgggccgtctgacgcgcccggtccagggtgcgcagcagccgctcgcagctctcgtccaagggccccgggacttcctcgccctccagcaggcgcaccacgggtgccacgtgcggcagcgccacctcgcccgggtcgcaaggtcctgttggggtaagggtctgggctgggctaggggcagagggtgggtcctagggtgaagagggtgcgccatacattgggccgaaacaccctaggacaaaagcaaggggtggagtttgggtcagatacgaagtcttgagcaggaccgagtcaggggaggggcccagggaaggggcggagcctaggagatagtgagggcggggcctagggatctggtcctggacctagcttcgcacagagggcgggggctagggcgagggggcggggccttggacccaaacagccagctgaatgtagggcggaggtggagcaaaggacagaaacaaggggtggattttggttggaaagagacccagaggccagagagcctagcaaagagctggatgggagacagggaccaggcctaaggcgcggagtggggtactaaaacccccgcggggcttagaaccggattgaggtcctgattagagttaccacttatctaaagatgccactcaccggtgccctcatccagcgtccgcattagaggcttcagctcctgctcgaaggccagcgcagcctccgtgtggctcctccggagctggcgccacgtgcgttccaaccgcgacacctggaagaagagacccgagcccgccttctctccactcttccccttcacttgctctctggcctcgtcccgcatccctgcttcctacgcacctggggcatgagcaaggcgcccatgaccgcagccagtccaggcaggtcccccgccgcccctggccgcagcgccagagccagctccaccaggcccttcagggcggcggcgcgctcctccagcggtcccgcgcagcccagcactgccagcgcccccgccaacgccagcgtctcgagcctgcagaggcggagggcaaggttttggaggcagtggcggggtttgcgatgtgggggtgaggagggagagcaggtgacacagctcatctcccctcctccctggggggccgtgaatgggggggaggttgaggaccctagggattttaggtggctgccttacctctccagcagttccaacctcaggcgatgtccatggggaagagtgagcagctccagaccagaggcaacccccatggcgccccgctgagccttggtcacccccaggaggcctgtctcctggcagtgggggaggggtaagagtagggagttcagaggagcagaatgagtaaatgggtatgaggtgagactgggccatgccctggcttcagccctacctggtaggggacccacctggcagtccaccaatagcaggtggagggcagtgctcccaggatggtgctccaggaacaggccacggagaatgcgcagggctttaggttccagaggccgattctgggggcccagcaggcaggaggggttgtcagggggacagaaagagacctcaccctgtggtcttgcaaaacatctttgctcctcctcctcttcctcttcattggcctcccaccatggtgcctctggctctgggcagctgtggccagggggtgttccatggaccctaggcactcggggcaccagctcacagtacgttggggagcgtccagaggcatcaggcagcatcagtgaaggtgttcgaggtggcttggttggtgccttggcatgaagctgcccatcggaggccctcaggttgtcagcaatggaccccaggagagctggggtctttagcaacacagggtcacttcctgtccgaggcaatgcagatgcgggcacagtggaggctcctgggggtcacacaagagagggtaaaagaggtccacagagaaaatagctggttggggctttgtggggtaccaacctccaggttcattcactcgttcagccaataaccaggtaccccacctaacctggcgcagctttggacttgaacgacttcaccaaaactcctctagcccatatggagttttgcaaattctgaatgctaaattttaaatttgaattctttgttcttgcccctcggttcctgcattgctatagctgtggcataagccagcagctacagctctgattcagcccctagcctcggaacctccatatgccgtgggtgtggccctaaaaagcaaaaataaataaataaatactcccgtctccatactccttactctgttctactttagtttttgccccaaagcatacataattgactaatttttgttgttcatggtccttcttcctctaaaaggatgttggctccaccagcgcagggatctgtgtcattcttgttcattgatgttatcacagcacttcatacagtctcaggcatgtcacgagactttgggtggagggcagggctgacaaggcagtcaggacacaaaggggactcttcctttatgtaggattatcagggtcggctgctctgatgaactcatgttagatgagaaggagtcagtcaggtaaaggtagggaatgagctttttccagtggtgagaatagcaagtgcaaaggccctgaggccggaacatattcggcaggttccagcaactgtaaaaaagactgtgtgattgacgtgaagaggggatgtagcaggagttattaggtcagccatggttagagcatatagggctccttggaataataacaaacccacattttattttcttcttcttatttttggccacacccacagcatgcagaagttctggggccagggatggaacctgtgccacagcagagacctgagccgcagcagtgacaatgccagatccttaacttgagccaatagggaactctggaactccataaacacatatttttttttaaatttttttacaaagttcctgtgtgtttttaaattactgtgacaacatgaagagtattaccatcccttttttccaaaaggttaagtcccctgcccaaggttccttaggtatagcctggcagagccgtccctgagctctgtgctgcctgggaagccccttacctggtccagggtggtcttctgttgggtgccccacatgctcc

SEQ ID NO: 27 - DNA, 5127 bp, Sus scrofa
ctcacttccccccccacccccgtcctttccctctgtccctttgtccctccaccgtccctccatcatggggtccacctcgggtcccaggctgctgctgctgctcctgaccagcctccccctagccctgggggatcccatttacaccataatcacccccaacgtcctgcgtctggagagtgaggagatggtggtgttggaggcccacgaagggcaaggggatattcgggtttcggtcaccgtccatgacttcccggccaagagacaggtgctgtccagcgagaccacgacgctgaacaacgccaacaactacctgagcaccgtcaacatcaagatcccggccagcaaggagttcaaatcagagaaggggcacaagttcgtgaccgttcaggcgctctttgggaacgtccaggtggagaaggtggtgctggtcagccttcagagcgggtacctcttcatccagacggacaagactatctacaccccaggctccacggtcctctatcggatcttcaccgttgaccacaagctgctgcccgtgggccagaccattgtcgtcaccattgagacacctgaaggcattgacatcaaacgggactccctgtcatcccacaaccagtttggcatcttggctttgtcttggaacatcccagagctggtcaacatggggcagtggaagatccgagcccactatgaggatgctccccagcaagtcttctctgctgagtttgaggtgaaggaatatgtgctgcccagttttgaggtccaagtggagccttcagagaaattctactacatcgatgacccaaatggcctaactgtcaacatcattgccaggttcttgtacggggagagtgtggatggaacagctttcgtcatctttggggtccaggacggtgaccagaggatttcattgtctcagtccctcacccgtgttccgatcattgatgggacgggggaagccacgctgagccaaggggtcttgctgaatggagtacattattccagtgtcaatgacttggtgggaaaatccatatatgtatctgtcactgtcattctgaactcaggcagcgacatggtggaggcagagcgcaccgggatccccatcgtgacctccccctatcagatccacttcaccaagacccccaagttcttcaaacccgccatgcccttcgacctcatggtgtatgtgacgaaccccgacggctcccctgcccgccacatcccggtggtgactgaggacttcaaagtgaggtccttaacccaggaggacggtgttgccaaactgagcatcaacacacccgacaaccggaattccctgcccatcaccgtacgcactgagaaggacggtatcccagctgcacggcaagcgtccaagaccatgcacgtcctaccctacaacacccagggtaactccaagaactacctccacctctcgttgccccgcgtggagctcaagccaggggagaatctcaatgttaacttccacctgcgcacggaccccggctaccaagacaagatccgatactttacctacctgatcatgaacaagggcaagctgttgaaggtgggacgccagccgcgcgagtctggccaggtcgtggtggtgctgcccttgaccatcacgacggacttcatcccttccttccgcctggtggcttattacaccctgattgctgccaatggccagagggaggtggtggccgattccgtatgggtggatgtcaaggactcatgtgtgggcacgctggtggtaaaaggtggcgggaagcaagacaagcagcatcggcctgggcaacagatgaccctggagatccagggtgagcgaggggcccgagtggggctggtggccgtggacaagggcgtgtttgtgctgaataagaaaaacaaattgacccagcgtaggatctgggatgtcgtggagaaggcagacattggttgcacaccaggcagtggaaaggactttgccggcgtcttcacagatgcagggctggccttcaagagcagcaagggcctacagactccccagagggcagatcttgagtgtccgaaaccagccgcccgcaaacgccgttccgtgcagctcatggagaaaaggatggacaaactgggtcagtacagcaaggacgtgcgcagatgctgtgagcatggcatgcgggacaaccccatgaagttctcgtgccagcgccgggctcagttcatccagcatggtgatgcctgcgtgaaggccttcctggactgctgcgaatacatcgcaaagttgcggcagcagcacagccgaaacaagcccctggggctggccaggagtgacctggatgaagaaataatcccagaggaagacatcatttccagaagccagttccccgagagctggctgtggaccattgaggagtttaaagaaccagacaaaaatggaatctccaccaagaccatgaatgtgtttttaaaagactccatcaccacttgggagattctggctgtgagcttgtcggacaagaaagggatctgcgtggctgacccctatgaggttgtggtgaagcaagatttcttcatcgatctgcgtctcccctactccgttgtgcgcaatgagcaggtggagatccgagctatcctctataactacagggaggcagaggatctcaaggtcagggtggaactgctctacaatccagctttctgcagcctggccaccgccaagaagcgccaccaacagactctaacggtcccagccaagtcctcagtgcccgtgccttacatcattgtgcccttgaagactggcctccaggaggtggaggtcaaggccgccgtctacaaccacttcatcagtgatggtgtcaagaagaccctgaaggtcgtgccagaaggaatgagagtcaacaaaactgtggtcactcgcacactggatccagaacataagggccaacagggagtgcaacgagaggaaatcccacctgcggatctcagcgaccaagtcccagacacggagtcagagaccaagatcctcctgcaagggaccccggtggcccagatggtagaggatgccatcgacggggaccggctgaagcacctcatccaaaccccctccggctgtggggagcagaacatgatcggcatgacgcccacagtcatcgctgtgcactacctggacagcaccgaacaatgggagaagttcggcctggagaagaggcaggaagccttggagctcatcaagaaggggtacacccagcaactggccttcagacaaaagaactcagcctttgccgccttccaggaccggctgtccagcaccctgctgacagcctatgtggtcaaggtcttcgctatggcagccaacctcatcgccatcgactcccaggtcctctgtggggccgtcaaatggctgatcctggagaagcagaagcctgatggagtcttcgaggagaatgggcccgtgatacaccaagaaatgattggtggcttcaagaacactgaggagaaagacgtgtccctgacagcctttgttctcatcgcgctgcaggaggctaaagacatctgtgaaccacaggtcaatagcctgttgcgcagcatcaataaggcaagagacttcctcgcagactactacctagaattaaaaagaccatatactgtggccattgctggttatgccctggctctatctgacaagctggatgagcccttcctcaacaaacttctgagcacagccaaagaaaggaaccgctgggaggaacctggccagaagctccacaatgtggaggccacatcctacgccctcttggctctgctggtagtcaaagactttgactctgtccctcctattgtgcgctggctcaatgagcagagatactacggaggtggctatggatctacccaggccactttcatggtgttccaagccttggcccaataccagaaggatgtccctgatcacaaggatctgaacctggatgtgtccatccacctgcccagccgcagcgctccagtcaggcatcgtatcctctgggaatctgctagccttctgcggtcagaagagacaaaagaaaatgagggattcacattaatagctgaagggaaagggcaaggcaccttgtcggtggtgaccatgtaccacggcaaggccaaaggcaaaaccacctgcaagaagtttgacctcaaggtttccatacatccagcccctgaaccagtgaagaagcctcaggaagccaagagctccatggtccttgacatctgtaccaggtaccttggaaaccaggatgccactatgtcaatcctggatatatccatgatgactggcttctctcctgatactgaagacctcaaactgctgagcactggtgtggacagatacatctctaagtatgagctgaacaaagccctctccaacaaaaacaccctcatcatctacctggacaagatctcacacaccctggaggactgtatatccttcaaagttcaccagtactttaatgtggggcttatacagcctgggtcagtcaaggtgtactcctattacaacctggatgagtcttgcacccggttctaccaccccgagaaggaggacgggatgctaaacaaactctgccacaaagaaatgtgtcgctgtgctgaggagaactgcttcatgcaccatgacgaagaggaggtcaccctggacgaccggctggaaagggcctgcgagcccggcgtggactatgtgtacaagaccagacttctcaagaaggagctgtcagatgactttgacgattacatcatggtcatcgagcagatcatcaaatcaggctccgatgaagtgcaggttggacaggagcgcaggttcatcagccacatcaaatgcagagaagccctcaaactaaaggaggggggacactaccttgtgtggggagtctcctccgacctgtggggagagaaacccaacatcagctacatcattgggaaggacacctgggtggagctgtggcctgatggtgatgtatgccaagatgaggagaaccagaaacagtgccaggacctggccaacttctctgagaacatggtcgtctttggttgccccaactgatgccactcccccacagtctacccaataaagctccagttatctttcacatttaaaaaaaaaaaaaaaaaaaaaaaaaa

SEQ ID NO: 28 - protein, 1661 aa, Sus scrofa
MGSTSGPRLLLLLLTSLPLALGDPIYTIITPNVLRLESEEMVVLEAHEGQGDIRVSVTVHDFPAKRQVLSSETTTLNNANNYLSTVNIKIPASKEFKSEKGHKFVTVQALFGNVQVEKVVLVSLQSGYLFIQTDKTIYTPGSTVLYRIFTVDHKLLPVGQTIVVTIETPEGIDIKRDSLSSHNQFGILALSWNIPELVNMGQWKIRAHYEDAPQQVFSAEFEVKEYVLPSFEVQVEPSEKFYYIDDPNGLTVNIIARFLYGESVDGTAFVIFGVQDGDQRISLSQSLTRVPIIDGTGEATLSQGVLLNGVHYSSVNDLVGKSIYVSVTVILNSGSDMVEAERTGIPIVTSPYQIHFTKTPKFFKPAMPFDLMVYVTNPDGSPARHIPVVTEDFKVRSLTQEDGVAKLSINTPDNRNSLPITVRTEKDGIPAARQASKTMHVLPYNTQGNSKNYLHLSLPRVELKPGENLNVNFHLRTDPGYQDKIRYFTYLIMNKGKLLKVGRQPRESGQVVVVLPLTITTDFIPSFRLVAYYTLIAANGQREVVADSVWVDVKDSCVGTLVVKGGGKQDKQHRPGQQMTLEIQGERGARVGLVAVDKGVFVLNKKNKLTQRRIWDVVEKADIGCTPGSGKDFAGVFTDAGLAFKSSKGLQTPQRADLECPKPAARKRRSVQLMEKRMDKLGQYSKDVRRCCEHGMRDNPMKFSCQRRAQFIQHGDACVKAFLDCCEYIAKLRQQHSRNKPLGLARSDLDEEIIPEEDIISRSQFPESWLWTIEEFKEPDKNGISTKTMNVFLKDSITTWEILAVSLSDKKGICVADPYEVVVKQDFFIDLRLPYSVVRNEQVEIRAILYNYREAEDLKVRVELLYNPAFCSLATAKKRHQQTLTVPAKSSVPVPYIIVPLKTGLQEVEVKAAVYNHFISDGVKKTLKVVPEGMRVNKTVVTRTLDPEHKGQQGVQREEIPPADLSDQVPDTESETKILLQGTPVAQMVEDAIDGDRLKHLIQTPSGCGEQNMIGMTPTVIAVHYLDSTEQWEKFGLEKRQEALELIKKGYTQQLAFRQKNSAFAAFQDRLSSTLLTAYVVKVFAMAANLIAIDSQVLCGAVKWLILEKQKPDGVFEENGPVIHQEMIGGFKNTEEKDVSLTAFVLIALQEAKDICEPQVNSLLRSINKARDFLADYYLELKRPYTVAIAGYALALSDKLDEPFLNKLLSTAKERNRWEEPGQKLHNVEATSYALLALLVVKDFDSVPPIVRWLNEQRYYGGGYGSTQATFMVFQALAQYQKDVPDHKDLNLDVSIHLPSRSAPVRHRILWESASLLRSEETKENEGFTLIAEGKGQGTLSVVTMYHGKAKGKTTCKKFDLKVSIHPAPEPVKKPQEAKSSMVLDICTRYLGNQDATMSILDISMMTGFSPDTEDLKLLSTGVDRYISKYELNKALSNKNTLIIYLDKISHTLEDCISFKVHQYFNVGLIQPGSVKVYSYYNLDESCTRFYHPEKEDGMLNKLCHKEMCRCAEENCFMHHDEEEVTLDDRLERACEPGVDYVYKTRLLKKELSDDFDDYIMVIEQIIKSGSDEVQVGQERRFISHIKCREALKLKEGGHYLVWGVSSDLWGEKPNISYIIGKDTWVELWPDGDVCQDEENQKQCQDLANFSENMVVFGCPN

SEQ ID NO: 29 - DNA, 15532 bp, Homo sapiens
gtatcatttcagtgaaggtcactccagtctttcatggaggccaaactaagggtgtaaattaggatcctcactgaagtggcgggaccctaagaggctttttcctggccccttagttgtgggttttcctgcgggcggcgcagccggtttccatcagaaccgcccagaggcggacgctgccttcctggggtgacggagcagcaggaagcgttttcggatcctggaatacgtgggcggcccgtgggaggggctgaggcgcagtttcctactcacccggatccgaatcctccgcggtgctgtttcaagagagccggattccagatcacgctccagcccggactcggaattcctgccctgcgggtctgcattttcataacgggcaggtgtgagtgccctgcagctggagaccagaagcctgaaggcagctcggccctccccagcccacagcgccgttattccgtttctatatcagtaaacacatttcattttccgtagaccagggcggggtgacgggtgatcccagtcctcgcagtgaattccgggcagcaaaattcaaaacacatgcggccaaggccgggcacggtggttcacgcctgtaatcccagcactttgggaggtcgaggcgggcgatcacctgaggtcgggagctcgagaccaacctgaccaacatggggaaatcccgtctctactaaaaatataaaattagacgggcttggtggtgaatgcctgtaatcccagctagtcgggaggctgaggcaggagaatcgcttaaaccttggaggcggaggttgcggtgagccgagatcgcgccattgcacttcagcctgggcaacaagagggaaaactccgtcgcaaaaactttcgggggcggagcggagccccgccctgggttatgtaagcgaccgcgctgggccgtttctctttcttttccggaccctgcagtggcgcctaaagtctgagagagggaagtcgcctctgtgctcgtgagtgcatggggtataaggcaagtgctgagggagaaaacgtagttgatggggtagagcagacggggttggaggtggggtggagggggagggctttggacagaagacctgggaggcttggtgggggaggggcgcccaggcctgggcactaagaaacaagtcccctggagctcaagaccatctcggcctcccctagcccaagagaggactggcttcatgactccctgaaaccatttctaaatgccttagaacaaaccttgcatattcattattgttattgaactattaaaagtcttttttgggggcgagctgaatcagatcctttgctggagctggcacacggaggaagtcctggagggagggtagacaccgtggaggtaagggcttgggacctgtgtcaggagagctaggtccatctccctcccagtctctcactaggcttatgatctttagcagtgaaaataatctctctaaggtggggaaaggaccccggtccctgctgtgctcaataaattatgaggatcaaaataaattatcagtgaatgtgaatgggaaaactaagaaattgttaaaattctcgaatacattacattttcatccacagaaaagtgtaggctagggatcatgggggaatagttagtaatgacagggatagttgaacttaaaaaaaaagtttgtgaggctgacaaagaagaaacggacacatttcctgatcttggagggttcatagggtagaagatggtagatgacagctgggtgtggtggcactcgcctgtagtcccagctactcaagaggctgtggtgggaggattgcttgagcccaggcattcaaggctgcagtgagctataatcatgccactgcattccaactgagtgacacagcaagactcctctcttaaaaaaaaaaaaaaaattcatggcagggcacaatgagtactatcaggaaggttcaaaccacgggctaaatcagtagttctaaaacttgactacacatcggaatcacctagggaactttaaaagatactaagatttaggtccaacctgggtttactgatttaacaacctaggttgtggctgtggcctgggaacatggatattaaaaactctccaggtggttctacgcagtggctaggtttgatgacctctgcctagatgtcccaacgactaagagatgtgcgttggggacaaggcaattctcttagtagaaagaggctttcgggacagcattcttattattgagaattgagaattcatatgccacacaatttatccttttaaagtgtgcagctcagtggcttctagcgtaatcacaaggttgtgccaccgtcaccactgtctaccctggaagattttttttcctttttttcttttttcttttctttttattttaaaggctagtcaagtgaaacagtgggagtgaagaagaaacaaagacatctataactggttgtgatcaattagttgtaaacactgcactcagaccagcctgggaagattttaaggatatggtgtggtctgatgggttccaaggcagaggttacaatagcctggaagagggagactgcttaggcagtggcatcctggtgggatagggtgaggagatcccagagcccacgtttactgcaaccctggggagatgtcaccagagaaatgggggtggtgccagacagcagattgtggcagctgaggttttccacggtagagtagaagcatccatcatgtgtgacattcagcagatggggcgctgtgggtggcttggagcactctggttgtaactgaggcaggcaccgtgtttaggaaggctgtgcagtaatctaggctgaagggaggggaaagcctagactaagattgtggctgtgggattgaaatagcgttgaaggagctgactttgactcccggagatgatggggaaagaggaaatcagaagggaccaaggatggtgatgttcttaagagaaactgaggaggaagagaggatgatatggtggcagacgtatagagagtctttgtagatctctcacattggaggggactatggtcggaggtacagatgtcctaaggcaggctggaaaagggagtctggagagagcttggtgttgtagtgaaccacagggagccgcctccttggccctgtgatcacccagggactgaatagagaggcggccctgggagacttcagacacttagaggatataagggggtgaaaggggggcctggctttgagtcaaagggaggagaaggagattataaagctgaaacgtctaagagagtttgtggtctgagcggttctactgcggcaggtgcttctgagaggcagaggtggctgagatctggaaacaggtctgcaaatctggtcactggtctcattgccagtaacgctgtgcgcggttgagggagtgtgttgggagaatagccacgcgttgtctgtcctggaaggaacaagccagtgagagccggtttaatggggcggccggcgaaaggggcttggtgaggcccgcgctcctcggggtgggggcgcggggatgggtggtcgcgatgccgggagggcaggcagggccctggccgtgcttatgaagttggagctgtactctcagctactcgaagctggtccctgctttaggctgcgctcccgcgtgctccccattttctgggccccaggtcccgccttctaaatctccccaggtctccagcccactggaattttctcttccaagcgtggccccgccctctccgctcgtgattggccctaagttccgggccccagtttcattggatgagcggtcgggggaccgggccaggtgactaagtttccgcggcgccttctccccggccactgcttgagccgctgagagggtggcgacgtcggggccatggggctgggcccggtctttctgcttctggctggcatcttcccttttgcacctccgggagctgctgctggtgagtggcgttcctggcggtcctcggcggagcgggagcagtgggacgtttccgggggtcgggtgggtagcggcgagcgctgtgcggtcagggcggggctcctgtgccctgtcggtggcgcagggagctggacgcggcccgttaccgccacacttcagccctgcttccccgtcacttttcagtcctcctcgggatcgcgcatcacctgcactttctggtctcctcctgctctttctctcctcgcgtctcctccgcttcctctcacttttcggacaaaccagtccttctgaggcccatgggttcccgggctgcctccggggctgctcctgtgaatggcattcgagtgcccttccagcgcggccactgaagcagccacaacccccggtgctcggggcggctctcaggtccctgaagtcctgtcctctcccggagccgacgtgttctcagctcctgggccgcagctcctggagtaggggccctcctttctcgggacccggagctggtgcttcctgctgctgtggggactgtggggggtcctgactctcaagctgaggggttggagtctgcaggctccgggcagaggattcttcctgcgacttctctcatccccagctcattctcccctcgcctctggctccgagggtcctctcctctctctcatcccacccctactaatgaccagtgatctaaggacaccagattccctctcacctcctccctgcccatctcagggcccgctgagtccttttgccctcccagctccctgctaccccttcctgtgtgctgttctctgatccatttctagggtgtcctctgccctcatcccctgtccccgccaccgaaggtccctcctgcaccccttatgggcctttcctacaagcagccttcacccagtgctgcccctatgcctccccgttcccaaatgtccctgactctaactttctggtgctgccttttatccgggggggtcttccctccatcccactcccctccagacccccaaggggaaccctgatgctaatggcagttgggccttaggcagggcgcagggcagcgcagatgccccctcccctccagtgcagatgcctgctctggaccctgcctcatggtggccccttccccactccttcatcctcagcctcaccctcttgaggaccccaccctccagcccacaggtgctggaccatccctccctggtccctccgcccctctccaccttgggaccttgtgctgctcctgtctcttgcccagctgccttgggccctcagcacgttctcatctttcagtgggaaagtgggagtgctggagcatatgacagtgctgagcatctttcccaagccccaccctcccccagagcaccctcccctcctgtcctcaccctaccccaagttctcccacagtcactcctgccccatgctcatgccgccctccagttcttgctctgcccatctcccctccccaacccagacctaaaacaggctgttgggccaactgttccttgaccttccttcttttcttttggttccttgaccccagtgggctctcactccccacaccgcatatctaaaatctgttttgcctgctcttggggtgccactgctccccctccagcattactccttttggcaggtccttcctcaggctgagaatctccccctctaccttggttttctctctctggccagcacccccaccccttgctttgtttttaatttttaacttttgtttgggtacgtagtagatatatatgtatatatttatggggtacatgggatattttgacacaggcctacaatatgtaataatcacatcagggtaaatgggttatatcacaacaagcatttatcctttctttgtgctacaaacaatcccattatgctctttcagttatttttaaatgtacaataaattattgttgactgtactcaccctgctgtgctatctactagatcttattcattctaattatatttttgtacccattattaaccatccctgctcccccactccccactacccttctcagcctctggtaatcatcattctattgtctctccccatgaggtccattgttttaaattttggctgccacaaataagtgagaacatgcaaagtttgtctgtctgggcctggggcttatttcacttcacaggatgacctccagttctttgcaaatgacacgatggctgaatagttctccacatacacatgtacaccacattttctttatccatgcgtctgttgatggacacttagattgcttgcagatcttggctactttgaatagtgctgcaataaacatggaaaagtagatagctctttaatataccgatttcctttctttggagtatatgcctaacagtgggagtgctggagcatatgacagctctattgtatttttagtttttggaagaacctccacattgtttcccatagtggttgtactagtttacgttcccaccaacagtgtacatcctcaccagcattccttatttctacatcctcgccagcattccttattgcctgtcttctggataaaagccagtttatctggggtgggatgttatctcgtaggagttttgatttgccttcatctgttgacgaatgatgttgagcaccttttcatatacctgtttgccatttatatgtcttcttttgagaaatgactattcagatcttttctcatttttaaattggattattatattttttttcctatagttgttcgagctccttatatgtttcagttactgatcctttgtcagatgaatagtttgaaaatattttctcccattcttggatggtctcttcattttgtttattgtttcctttgctgtgcagaagcctttttacttgatatgatcccatttatgcaattttactttggttacctgtgcttgtggggtattactttaaaaatctttgcccagtccaatatcctagagagtttccccaatgttttcttgtatagtttcatagtttgaggtcatagatttacatctttaatccactttgatttgatttttgtatatggtgaaagacagggtctagtttcattcttctgcataaggatatctagtttccccagcaccatttttgaagagactctcctttgccaatgtgtgttcttggtacctttgttggaaatgagtttactgtagatgtatggaattgtttctgggttctctattctgtttcattggtctgtgtgtctgtttttatgccagtatcatgctgttttggttactgtagctctgtagtataatttgaagtcagataatgtgattcctctagttttgttcattttgctcaggatagctttatctattctggtttttttgtggttccatatgcattttaggattatttttattatttctgtgaagaatgtcattagtgttttgatagggattgcattgaatctgtagattactttgggtagtatggatatttcaacaaaactgattcttccaatccatgaacgtggactatcttttccattttttgtgtccttcaattttttgcatcagtgttttttgtttttggtttttgagatggagtttcactcttgttgcccaggctagaatgcaagggtgtgatcttggctcaccgcaacctccgcctcccaggttcaagctattcttctgcctcagcctcccaagtagctgggattacaggcatgtgccactgtgcctggctaattttctatttttattagagatggggtttctctatgttggccaggctagtcttgaactcctgacctcaggtgatccacctgcctcggcctcccaaagtgctgggattacaggcatgagccaccacgcccagccacatcactgttttatagtttttattggagaggtctttcacttcttcagttaggtttattcctcagtattttattttatttgtagctattgtaaatgggattcgtttcttgatttctttttcagattatttgctgttagcactgatttttgcatgttgattttgtatcctgcaactttactgaatttgttcttcagttctaatggttttttggtggagtctttaggtttttccaaatatcagaccacatgatctgcaaacaaggataatttgacttcttcttttccagttttaatgccctttctttctttctcctgtctgattgctctagttaggatctgcagtactgtgttgcataactgtggtaaaattagtcatccttgtcttattccagatcttagagaaaaggctttcagttttcccccattcagtatgttactagctgtgagtttgtcatatatggcttttattatattgaggtctgttccttgtatacttagttttttgagagtttttatcatgaagggatgttgaatttatcaaatgctttttcagtatcaattgaatgatactggcttttgtcctttattctgttgatatgacgtattacattgattgatttgtgtatgttaaatcatccttgcatacctggaatacattccacttgctcataaagaatgatcttttttaatgtattgttgaatgtggtttgctagtatttccttgacgatttttgcatcggtgttcatcagggatataggcctgtagttttcttttttatgatgtgtctttgcctggtttttgtatcaggatattcctggctttgtaaaatgagtttggaagtattccctcctcctctatttttcagaacagtttgaataggactgacatatgttgttctttaaaagtttaattgtggtaaattatacattacataaattttactgttttaaccacttttaagtgtatactcggtggcattagatacattcacatttttgtgcaacccaaaactctgtgcccattaatcggtaactccccattcctccctacctctggcccctggtaaccaccattctactttttgtttctatgaatttgaccactctaggtacctcatttaagcagaatcatgtaatgtttgtctttttgtttctggcttatttcacttataatatttttgaggttcggtgggcacagtggctcacgcctggatttccagcactttgggaggctgaagcaggtggatcacctgagtttcggagttcgaaaccagcctggccaacatggtgaaaccccatctctactaaaaataataaaagttagccgggcgtgatggcgggtgcctgtaatcccaactacttgggaggctgaggcaggagaatcgcttgaatccgggaagtggaggttgcagtgagctgagatcaggccactgcactccagcctgggcaacaagagtgaaattccatctccaaaaaaaaaaataaaacaataataataataatatttttgaggttcatccaagttgtagtatgggtcagaatttcattccttttaaggatggataatactcattatatgtatgtaccacatcttggttatccatccctcagacaatggacacttgggttacttctaccttttggatattggcaaatatttcatttcctttgggtatatatttatttcctttgggtatttcttttgggtatatatccagaaatagaagcagtacacaggggcttcattttctctgtctctttgccaaccttgctctgtgtgtgtgtgtatgtgtgtgtgtaggtgtgtgataacagccatcctgattggtttcaggtggcatctcattgtggtttggatttgcattttcctaatgagtgctgatattgagcatcttttcatgtgtttgttgatcatttgtaattttctttgaagaattggccatttaagtcttttgcccattttttcccccacatagcttctcttatcagatatatgacttgcaatatttatttcatttcggggttgattgctttttcactctgattgtgccctttgatgcatagatgttttgaattttcatcagtctactttgtcagttctttctattctatctgtgctttggtgtcatatccatgaaagcactgtcaaatcctatgtcatgaacattatccccaatgtttgcttctaagaaatttttaggttttagttcttgagtgtagagtttaggtctttgattcattttgagttaatttttgtatatagtgcaaattaagggtccaattttattttaacaccccctgcccccagaactatttgctgaaaagatcaactgactctttgtcacctgctcaccccagtggacactagctgttccatccaattgctgtcctggggccttgtcatgctactcttccactttgaacccaagcccacaccgttcgttgctcccctctgggatactgaccccactataaacttctctggggctacaaccttcctaccctttgtgcctcatgaccaccccctcccttgtccccgccatgcccatgatgagtctcttctcgaggcagctccccttgcctccatctcaccctcagcctatgcaccacagccacactggacatgggtccctctgagcctgagtcccttcccattcccaccatcccctctggcaagaccttccttccaccaccttcatgctcctcccttgcccctgcagggcagcctctccccttggcccctattcccttagggggcttgtggccacccagtccttgcacctggcctacaagtttgccatcttcattcccccttcttctgttcatcagccccctcctctatcctcccaccctcacagttttctttgtatatgaaatcctcgttcttgtccctttgcccgtgtgcatttcctgccccaggaaggttgggacagcagacctgtgtgttaaacatcaatgtgaagttacttccaggaagaagtttcacctgtgatttcctcttccccagagccccacagtcttcgttataacctcacggtgctgtcctgggatggatctgtgcagtcagggtttcttgctgaggtacatctggatggtcagcccttcctgcgctatgacaggcagaaatgcagggcaaagccccagggacagtgggcagaagatgtcctgggaaataagacatgggacagagagaccagggacttgacagggaacggaaaggacctcaggatgaccctggctcatatcaaggaccagaaagaaggtgagagtcggcaggggcaagagtgactggagaggccttttccagaaaagttaggggcagagagcagggacctgtctcttcccactggatctggctcaggctgggggtgaggaatgggggtcagtggaactcagcagggaggtgagccggcactcagcccacacagggaggcatggaggagggccagggaggcataccccctgggctgagttcctcacttgggtggaaaggtgatgggttcgggaatggagaagtcactgctgggtgggggcaggcttgcattccctccaggagattagggtctgtgagatccatgaagacaacagcaccaggagctcccagcatttctactacgatggggagctcttcctctcccaaaacctggagactgaggaatggacagtgccccagtcctccagagctcagaccttggccatgaacgtcaggaatttcttgaaggaagatgccatgaagaccaagacacactatcacgctatgcatgcagactgcctgcaggaactacggcgatatctagaatccggcgtagtcctgaggagaacaggtaccgacgctggccaggggctctcctctccctccaattctgctagagttgcctcacctcccagatgtgtccagggaaaccctccctgtgctatggatgaaggcatttcctgttggcacatcgtgtcctgattttcctctattgttagagccactggataaagacagagggtcagggactggaccatccagtgttgtaatcagggcaagtagaggaccctccgacagaatcctgagcctgtggtgggtgtcaggcaggagaggaagccttcagggccagggctgccccctctgcctcccagcctgcccatcctggagagttccctcctggccccacaacccaggagtccacccctgacatccccctcctcagcatcaatgtggggatcccagagcctgaggccacagtcccaaggcccatcctcctgccagcctggaagaactgggccccagagtgaggacagacttgcaggtcaggggtcccggagggcttcagccagagtgagaacagtgaagagaaacagccctgttcctctcccctccttagaggggagcagggcttcactggctctgccctttcttctccagtgccccccatggtgaatgtcacccgcagcgaggcctcagagggcaacatcaccgtgacatgcagggcttccagcttctatccccggaatatcatactgacctggcgtcaggatggggtatctttgagccacgacacccagcagtggggggatgtcctgcctgatgggaatggaacctaccagacctgggtggccaccaggatttgccgaggagaggagcagaggttcacctgctacatggaacacagcgggaatcacagcactcaccctgtgccctctggtgagcctagggtgaccctggagagggtcaggccagggtagggacagcagggatggctgtggctctctgcccagtgtataacaagtccctttttttcagggaaagtgctggtgcttcagagtcattggcagacattccatgtttctgctgttgctgctggctgctgctatttttgttattattattttctatgtccgttgttgtaagaagaaaacatcagctgcagagggtccaggtgagaaaagcgggcagtttctggagatggtaaggcccctgtctgggcagtagggtcccctcattgctcctgcaaagataggcatgttggtgacaaggcttccataacaggggatgaaagttggggaatttgggaagggaatgggggcagcatctccatctacacccataagtgctgcccaagcaagggtcaaacgcccagctgtggcatcctcctgctgcaggtgaggagtgggcagcagggagggctgcggcgcctgctctgtccccatcccggtctctgtgtctcttgaactcactagggcgcatccaggtggggtgagctgggaatcacgtgctgaatgctaagggcctggatgatcacggcctcagagggagcaaatagtaaaggcagctgtgatctggggagggccagaaactggagaggaatctgaggagaggcggtgcccctattcccttcctctctgcatccccctcccctgtttctccagccatcggggcggacaccgagaaaaagacctatgaggcccagcctgggggccctgcctgtgtagccctttggagaccccttgtaacagggagggtcctgagcacacatggccatctctgtccactttgcagctccccatgcacctcctccaggagctttcttggggttgtcgtgtcctctgcaccattcgaggccctactctttccaggttcccacggcctggcctccctgagtttcttgcagatgacatggatgagtagataagcagatgtccctgggccatttgaggagtggggcccagcccctcatcagggcagctgtggtccctgttttcatcctacctccgagtgttttcttctccagtccctgagggacacagtcctcagggcccatgtttttggggatttaatctgtgctctgtggcctcaccttgccctccctgagccaatttccctttctaaaggtggtcactgcctggtaagtttggagtaagggacggtcagaatcatttcccctacagtcaggttgtttgatgggggatgaaaagagacagcaggaagttttgtgtttctgcaaagacagaagcagttcaggcgacagtaagaggctggggtgtccaggaggatgtgtctggcagtagggtcgctggtttctcatccttgaacctaattgcactgtcaatcggcccctcaggcctgagcagatgggaaggtttgtcccctgccctgcagcaagagggccctgtccaggaggcacccacaacaggggcagtgcaggtctgtggtcactcctgctctcacctgtggcgtctcccgtagagggattgtcagttctggttccctgtgggcaggaatggtttcctcataggtcactggagttttggccaggaaaagagtatgaagttcatgtgccagtttctcaaaattcctgctttcaatgttgatgtccagtaaagatattcgtaatttcagctctataatcttaataggatttcctctaatattgtgaagcatattatatgaaacaggaacacaaatttctcaaaattcctgcgatgtccaataaagattttcataatttcagctctgcaatcttaataggatttcctaatactgtaaagcatattaaatgaaacaggaactcaaatttggagccccctctccaggaggttctgtgtggagatggtggctgtggcagtggcagttcccaggtgcagagggtgggcagaggcagcctcaggctaaggggtctcccctactccacatggagaaaatcccttgtaggttgcaagggcagtggccgggtggaatccctgctagggacagagcaggaaggcctcgcagcctcaccaagcagcagccctggggtggagctgcgtttccagggttaagcggaccaggcaggagtagcggttactcaagagcaggtcacaggcttgggttgtgagggtcaggagaggccaggcctcctcgagcaaggtgggggtcccagggtcaggtcaggtgcagatcctgtggcagccacgtctttccatgctgggcctgctgggccccccaggcttcctgatggggtccccagttaggagctgcctgctcagggctgggaggggaggagcactgagctgcagatagagggcagagcccacagtgggcagggcctgccctggtgtgtaggtgcctctgaaggagaggagggcctggggactgagagcaagggtcagggcctctctttggggaggcctctcactgtaacaggactggtcaggcctgagaggagggcactgggttccctcttgggtcttgtcctttagtcttggggccctttccctccctgcacgatgagtggtgggcacagggcacgggctgatgttgatggagtgatgggagggaactggcaggggctgggaaaagcaaggagggaggaagaaaaaagtgggggcctcatcttccctcagagaaagggcaaatctggttttggagcaactgaagagagaaaagtccccagggaataaacacaacactgcacccagtggagcatttacccatttccctcttttctccagagctcgtgagcctgcaggtcctggatcaacacccagttgggacgagtgaccacagggatgccacacagctcggatttcagcctctgatgtcagctcttgggtccactggctccactgagggcacctagactctacagccaggcggctggaattgaattccctgcctggatctcacaagcactttccctcttggtgcctcagtttcctgacctatgaaacagagaaaataaaagcacttatttattgttgttggaggctgcaaaatgttagtagatatgaggcatttgcagctgtgccatattaa

SEQ ID NO: 30 - DNA, 1410 bp, Homo sapiens
aagtttccgcggcgccttctccccggccactgcttgagccgctgagagggtggcgacgtcggggccatggggctgggcccggtcttcctgcttctggctggcatcttcccttttgcacctccgggagctgctgctgagccccacagtcttcgttataacctcacggtgctgtcctgggatggatctgtgcagtcagggtttctcactgaggtacatctggatggtcagcccttcctgcgctgtgacaggcagaaatgcagggcaaagccccagggacagtgggcagaagatgtcctgggaaataagacatgggacagagagaccagagacttgacagggaacggaaaggacctcaggatgaccctggctcatatcaaggaccagaaagaaggcttgcattccctccaggagattagggtctgtgagatccatgaagacaacagcaccaggagctcccagcatttctactacgatggggagctcttcctctcccaaaacctggagactaaggaatggacaatgccccagtcctccagagctcagaccttggccatgaacgtcaggaatttcttgaaggaagatgccatgaagaccaagacacactatcacgctatgcatgcagactgcctgcaggaactacggcgatatctaaaatccggcgtagtcctgaggagaacagtgccccccatggtgaatgtcacccgcagcgaggcctcagagggcaacattaccgtgacatgcagggcttctggcttctatccctggaatatcacactgagctggcgtcaggatggggtatctttgagccacgacacccagcagtggggggatgtcctgcctgatgggaatggaacctaccagacctgggtggccaccaggatttgccaaggagaggagcagaggttcacctgctacatggaacacagcgggaatcacagcactcaccctgtgccctctgggaaagtgctggtgcttcagagtcattggcagacattccatgtttctgctgttgctgctgctgctatttttgttattattattttctatgtccgttgttgtaagaagaaaacatcagctgcagagggtccagagctcgtgagcctgcaggtcctggatcaacacccagttgggacgagtgaccacagggatgccacacagctcggatttcagcctctgatgtcagatcttgggtccactggctccactgagggcgcctagactctacagccaggcagctgggattcaattccctgcctggatctcacgagcactttccctcttggtgcctcagtttcctgacctatgaaacagagaaaataaaagcacttatttattgttgttggaggctgcaaaatgttagtagatatgaggcgtttgcagctgtaccatattaaaaaaaaaaaaaaaaaa

SEQ ID NO: 31 - protein, 383 aa, Homo sapiens
MGLGPVFLLLAGIFPFAPPGAAAEPHSLRYNLTVLSWDGSVQSGFLTEVHLDGQPFLRCDRQKCRAKPQGQWAEDVLGNKTWDRETRDLTGNGKDLRMTLAHIKDQKEGLHSLQEIRVCEIHEDNSTRSSQHFYYDGELFLSQNLETKEWTMPQSSRAQTLAMNVRNFLKEDAMKTKTHYHAMHADCLQELRRYLKSGVVLRRTVPPMVNVTRSEASEGNITVTCRASGFYPWNITLSWRQDGVSLSHDTQQWGDVLPDGNGTYQTWVATRICQGEEQRFTCYMEHSGNHSTHPVPSGKVLVLQSHWQTFHVSAVAAAAIFVIIIFYVRCCKKKTSAAEGPELVSLQVLDQHPVGTSDHRDATQLGFQPLMSDLGSTGSTEGA

SEQ ID NO: 32 - DNA, 16848 bp, Homo sapiens
ctgtttccagcgagtcagattccagatcgcgctccagcctggactcggaattcctgccccgcgggtctgcattttcacagcggcaggtgtgagtgccgcgcagctggagaccagaagcctgaggcagctcggccctccccagcccaaagtgccgttattccgtttctgtatcagtaaacacgtttcattttccgtagaccagggaagggtgatgggtgatcccagtcctcgcagtgaattccgggccacaaaattcaaaacgcttgcgggcaaagccgtgcgcggtggctcaagcctgtaattccagcactttgggaggccgaggcgggcggatcacctgaggtcgggatttccagaccagcctgaccaacatagagaaaccccgcctctactaaaaatacaaaattagccgggggtggcgcatgcctgtaatcccagctagtcgggaggctgaggcaggagactcacttgaacccgggaggcggaggttgctgtgagccgagatcgcgccactgcactccagcctgggcaacaagagcgaaactccgtttcaaaaaaaaacaaaaaacaaaaagctttcgggcgccgagggcagccccgccctgaattttgtgagcgaccgcgctgggccgtttctctttcttttccggaccctgcagtggcgcctaaagtctgcgaggaggaagtcgcctctgtgctcgtgagtccagggatctaaggcaagtgctgagggagaaaacatagttgatggggcagagcagagggggctggaggtggggtggagggggagggctttgaacagaagacctgggaggcttggtgggggaggggacccaggcctcggcgctgagaagcaactcccctggagctcaagaccttcttggcctcccctagcccaggggaggactggcttcatgtctccctgaaaccgcttctaaatgccttagaacaaaccttaaatattcattattattattgaactattaaaagtcttttttggaggcgagctgaatgagaccctttgctggagctggcacacggaggaagtcctggagggagggtagacaccgtggagggaagggcttgggacctgtgtcaggagagctgggtccatctgcctctctgtctcaaactatgcttatgatctttagcagtgaaaataatctctctaaggtggggacaggaccccagtccctgctgtgcttaataaattatgaggatcaaaataaattatcagtgaatgtgtatgggaagactaagaaattgttaaaattctcgaatacattacattttcatccacagaaaagtgtaggctagggatgataggggaatagttagtaatgacagggatagttgaacttaaaaaaaaaggttgtgaggccaacaaaaaagaaatggacacagttcctgatcctggagggttcatagtctaatgggggaggagggtagaagatggtaggtgatggctgggtgtgtggcactcgcctgtagtcccagctactcaagaggctgtggtgggaggattgcttgagcccaggcatttgaggctgcagtgagctataatcacaccactgcattccaactgagtgacacagcaagactcctctcttaaaaaaataaaataaagtaaatgaaaaaaataagattcaagacagggcacagtcggtaccatcaggaaggttcaaaccatgggctagatcagtagttctaaaacttgactacacatcggaatcacgtagggaactttaaaagatactaaggtttaggtccaacctaggtttactgatttaactggttgtggctgtggcctgggaacatggatattaaaaactctccaggtggttctacgcagtggctaggtttgaagaccactgcctagatgtcccaatgactaagaatgtgcgctggggacaagccaattctcttagtagaggctttccagacagaattcttattattgagaattgagaattcacatgccacacataatttatcgttttaaagtgtacagatcagtggcttctagcataatcacaaggttgtgccaccgtcaccactatctacttgggaagattttcttcctttttttcttttttttttttttttttgaggcggagccttgctctgttgcccaggctggagtgcagtggcgcaatctcagctcactgcaagctccgcctcccgggttgaccccattctcctgcctcagccttctgagcagctgggactacaggtacccgccaccacgcccagctaagttttttgtatttttagtagagacggggtttcactgtgttagcaggatgctctcgatctcctgacctcgtgatctgcccacctcgacctcccaaagtgctgggattacaggcgtgagccaccgtgcccggaccctttttcctttttttttttttttaaaggctagtcaagtgaaacagtgggagtgaagatgaaacaaaaacatctataactggttgtgatcaattagttgtaaacaccactgcactcagaccagcctaactgggaagattttgaggatatgctgtggtctgatgggttccaaggcagaggtgacagtaacctggaagagggagactgcttaggcagtggcatcctggtgggatagggtgaggagatcccagagcccacgtttactgcaaccctggggaaatgtcaccagagaaatgggggtggtgccagacaatagattgtgggagctatggtttccatggtagagtagaagcatccaccatgtgtgacattcagcagatggggcgctgtgggtggcttggagcactctggttgtaactgaggcaggcacagtgtttaggaagcctgtgcagtaatccagactgaagggaggggaaagcctagactaagactatggctgtgggattgaaatagcgttgaaggagctgactttgactcccggagatgaaggagaaagaggaaatcagaagggaccaaggatggtgaagttcttaagagaaactgaggaggaagagaggatgatgtggtgggagacgtgtagagagtccttgtagatctgtcatattgaaggggactatggtcccagaggtacagatgtcctaaaacaggctggaaaagggagtctggagagagcttggtgttgtaatgaaccatggggagccgcctcgttggccctgtgattacccaggaactgaatagagagggggccctgggagacctcagacacttagaggatataagggggtgaaaggggggacctggctttgagtcgaagggaggagaaggagattatatagctgaaacgtctaagagaatttgtgatctgagcgtttctactggggcaagtgcttctgaaaggcagaggcggctgagatctggaaacaggtctgcaaatctggtcactggtctcattgcagtaacgctgtgcgcggttgagggagtgtattgggagaaaaaccacgcgttgtctgtcccggaaggaacaagccagtgagagccggcctgatgggaggaccggcgaaaggggcttggtgaagcccgcgctccttgggggtgggaatgcggggatggggtggtcgcgatgcagggagggcgacagggtccaggtcgtgctcataagtttggagctgtactctcagctactcggggctggtccttgattttggctgcgctcgcgcacgctcccccttttctggccgccaggtcccgccttctaaatttccccaggtctccaggccgctagaattttctcttctgaacgtggccccgccctctccactcatgattggccctaagttccgggcctcagttttcactggataagcggtcgctgagcggggcgcaggtgactaaatttcgacggggtcttctcacgggtttcattcagttggccactgctgagcagctgagaaggtggcgacgtaggggccatggggctgggccgggtcctgctgtttctggccgtcgccttcccttttgcacccccggcagccgccgctggtgagtggggttcctggcggtccccggcggagcgggagcggcggggcgtttccgggggtccgggtgggttgccgcgagcgctgtgcggtcagggcggggctcaggtgtgctgtctggagtgcagggagctggacgccgcctgttcccgccacacctcagccctgctttcccatctcccgtctctttttttttttttttttttttttttttttttttttttctttctgagacggagtctctgtcgcctaggctgtagtgcagtggcgcgatcttggctcactgcaagcgccgcctcccgggttcacgccattctcctgcctcagcctccctagtagctgggactacaggcgcccgccaccacgcccggctaattttttgtgtttttagtagagatggggtttcaccgtgttagtcaggatggtctcgatctcctgacctcgtgatccgcccgcctcggcctcccaaagtgctgggattacaggcgtgagccaccgcgcccgacctcctgtctcctttcagtcctcctcgggatcgcgcatcacccgcattttctggtctctcctgcacttgctctcctcgcctctcctccgtctcctctcacttttcggacaaaccagtccttctgaggcccctgggttcccgggctgctcctgtgaatggcattggaaggccgttccagcgcggccgctgaggcagccacttcccccggtgctgggggcggatctcaggtccctgaagtcctgtcctctcccggagccgatgtgttctcagctcctgggccgcagctcctggagttggggccctcctttcttgggacccggaggtggtgcttcttgctgctgtggggactgtggggggtcctgactctcaagctgaggggttggagtctgcaggctccgggcagaggattcttcctgcgacttctgtcatccccagctcattctcccctcgcctccggctccgggggtcctctcctctctcgcatcccacccctactaatgaccaatgatctaaggacaccagattccctctcacctcctccctgcccatcttacggcgccctgggtcctgttgctctcccagctccctgctaccccttcctgtgtgctgttctctgatccatttctagggtgtcctctgccttcatcccccgcccccgccactgaaggtccctcctgcctcctttatgggcctttcctgcaagcagccttcactccgtgctgcccctatgcctccccattcccaaatgtccctgactctaactttctggtgctgccttttgtccgggggggtcttccctccatcccactcccctccagacccccaaggagagccctgatgctaatggcagttgggccttaggcagggcgcagggcagcgcagatgccccctcccctccagtgcaggtgcctgctctgggccctgcctcattgtggccccttccccactccttcatcctcagcctcaccctcttgaggaccccaccctccagcccacaggtgctggaccatccctccctggtccctccgcccctctccaccttgggaccttgtgctgctcctatctcttgcccagctgcctggggccctcagcaagttctcatctttcagtgggaaagtgggagtgctggagcatatgacagtgctgagaatctttcccaagccccaccctcccccagagcaccctcccctcctgtcctcaccctaccccaagttctcccacagtcactcctgccccatgctcatgccgccctccagttcttgctctgcccatctcccctccccaacccagacctaaaacaggctgttgggccagctgttccttgaccttccttcttttcttttggttccttgaccccagtgggctctcactccccacaccgcatatctaaaatctgttttgcctgctcttggggtgccactgctccccctccagcattactccttttggcaggtccttcctcaggctgagaatctccccctctaccttggttttctctctctggccagcacccccaccccttgctttgtttttaatttttaacttttgtttgggtacgtagtagatatgtatgtatatatttatggggtacatgggatattttgacacaggcctacaatatgtcataatcacatcagggtaaatgggttatctatcacaacaagcatttatcctttctttgtgctacaaacaatcccattatgctctttcagttatttttaaatgtacaataaattattgttggctgtactcaccctgctgtgctatctactagatcttattcattctaactatatttttgtacccattaaccatccgcactcccccactccccactacccttctcagcctctggtagtcgtcattctattgtctctccccatgaggtccattgttttaatttttggctgccacaaataagtgagaacatgcgaagtttgtctctctgggcctggggcttatttcacttcacatgatgacctccagttctttgcaaatgacatgatggctgaatagtactccacatacacgtgtgcaccacattttctttctccattcgtctgttgatggacacttaggtcgcttgcagatcttggctattttgaatagtgctgcaataaacatggaaaagtagatagctctttaatataccgatttcctttcttttgggtatatgcctaacagtgggagtgctggagcatatgacagctctattatatttttagtttttggaagaacctccacattatttcccacagtggttatactagtttacgttcccaccaacagtgtacaagggttctcttttgctacatcctcgccaggattccttattgcctgtcttctggataaaagccagtttatctggggtgggatgatatctcgtaggagttttgatttgccttcatctgatgacgaatgatgttgagcaccttttgatatacctgtttgccatttgtatgtcttcttttgagaaatgactattcagatcttttgctcatttttaagttggattattagatatttttcctatagagttgtttgagatccttatatgttttggttactaatcctttgtcagatgaatagtttgaaaatattttctcccattcttggatggtctcttcactttgtttattgtttcctttgctgtgcagaagctttttaacttgatatgatcccatttatgcatttttactttggttgcctctgcttgtggggtattacttaaaaaatctttgccagtccaatatcttagagagtttccccaatgttttctttcatagttttcatagtttgaggtcatagatttacatctttaatcctttttgattggatttttatatgtggtgagagatagggtccagtttcattcttctgcataaggatatctagtttccccagcaccatttattgaagagactctcctttgccctgtatgtgttcttggtaactttgttagaaataacttcactgtagatatatggatttgtttctgggttctctattctgtttcattggtccgtgtgtctgtttttatgccactaccgtgctgttttgattactctagctctgtagtataatttgaagtcagataatgtgattccgctagttttgttctttttgctcagggtagctttatctattctgggttttttgtgattccatatacattttaggattgtttttctatttctgtgaagaatgtcattggtgttttgatagcaattgcattgaatttgtagattgctttgggtaggatggatattttaacaaaattgattcttccggctgggcacggtggctcactcctgtaatcccagcactttgggaggccgagtcaggtggatcacttgagatcaggagttcaagaccagcctgatcaacatggggaaaccccgcctctactaaaaatacaaaattagccaggcgtggtggcatatgcctgtaatcccagctactcaggaaagctgaggcaggagaatcgcttgaacccaggaggcagaggttgtggtgagctgagattgcaccattgcactccagcctgggcaacaggagcaaaactccatctcagaaaataaaaataaacattgattcttccagtccgtgaacatggaatgccttttccattttttgtgtcctcttcaatgttttgcatcagtgctttatagtttttattggagagatctttcacttcttcagttaagtctattcctaggtattttattttatttgtagctaatgaaaatgggattcgtttcttgatttctttttcagattatttgctgttagcacatagaagtgctattgttttttgcatgttgattttgtatcctgcaactttactgaatttgttcttcagttctaatagttttttggtggagtctttaggttttccaaatatcagaccacatgatgtgcaaacaaggataatttgacttcttcttttccaattttgatgccctttatttccttctcctgtcagattgctctagctaggacttgcagtattgtgttgcataactgtagtgaaagtagtcatccttgtcttgttccagatcttaaagaaaaggctttcagttttcccccattcagtatgttactagctgtgagttgtcatatatggcttttgttatattgaggtctgttccttgtatactcagtttttttagagtttttatcatgaagggatgttaaacttatcaaatgctttttcagtatcaattgaaatggtgatatggcttttgtcctttattctgttgatacgatgtattacattgattgatttgtgtatgcatacctggaatacattccacttggtcatgaagaatgatctttttaatatactgttgaatgtggtttgctagtatttcattgatgatatttgcctcaatgttcatcagggatataggcctgtagttttctttttttgatgtgtctttgcctgattttgatatcaggatattcctggctttgtaaaatgagtttggaagtattccctcctcctctgtttttcagaacaatttgaataggactgatatttcttgttctttaaacgtttaattgtggtaaattatacattacatacattttactgttttaaccgcttttaagtgtatactcggtggcattagatacattcacatttttgtgcaacccaaaactctgtacccattaatcagtaactccccattcctccctacctctggcccctggtaaccatcattctactttttgtttctatgaatttgaccactctaggtacctcatttaagtagaatcgtgtaatgtttgtctttttgattctggcttatttcacttataatatttcgaggttcatccaggttgtagtatgggtcagattttcattccttttaatgatgaataatactcattatatgtatgtaccacatcttggttatccattcctcagacaatggacacttgggttacttctaccttttggatattggcaaatatttcatttctcttgggtatatatttatttcttttgagtatttcttttgggtatatatccagaaatagaattgttggatcatacggtatttcattttttaatttttagaggaatcaccatagtgttttccattgcaggcgtgccattttgtatttctagaagcagtatacaggggcttcagtttctctacctccttgccaaacttgctgtgtgtgtgtgtgtgtgtgtgtgtgtgtgtgtgtgtgataatagccaccctgattggtttgaagtggtatctcattgtggtttggatttgcattttcctaatgagtactgatattgagcatcttttcatgtgtttattgatcatttgtatattttctttgaagaattggccattgaagtcttgcccatttttctcccccacatagcttctcatggctattttgcccatttttgagtgggttgactgttttgttgtttttgtcaaacttttttgcatattctggaaactaatctctctctttttctttttttttttttttttttttttgagatggagtcttgctctgttgcccaggctggagtgcagtggcacgatctcagctcactgcaagctccgcccgctagcttcatgccattctcccgcctcagcctcccgagtagctgggactacaggcgcccgccaccacacccggctaattttttgtatttttagtagagatagggtttcaccatgttagccaggatggtctcaatctcctgacctggtgatacacccgcctcggcctcccaaagtgctggaactacaggcttgagccaccacgcctggccttctggaaactaatctcttatcagatatatgacttgcaatatttatttcatttcaggggttgattgctttctcactctgattgtgccctttgatgcacagatattttgaatttttcatgagtccagtttgtcagttctttctattctatctgtgctttggcgtcatatccatgaaagcactgtcaaaccctatgtcatgaacattatacccaatgtttttttctaagatatttttatgttttagttcttgagtttagagtttaggtctttgattcattttgagttaatttttgtatatagtacaaattaagggtccaattttatattatttgaacatccagttcccccagcactatttgctgaaaagatggacttactctttgagaccctgtcacctgcccaccccagtggacactagctggtccatccaattgctgtcctggggccttgtcatgctactcttccactttggacccaagcccacatcattgctcccctctgggatactgaccccactataaacttcactggggctacaaccttcctaccccttgtgcctcatgaccaccccctcccttgtccccaccatgcccatgatgagtcttttctcaaggcagctcgccttgcctccatctcaccctcacctgtgcaccacagccacactggacatgggtccctctgagcctgagtcccttcccattcccactgtcccctctggcaagaccttccttccaacactgccttcatgctcctcccttgcccctgcagggcagcctctccccttggcccctattcccttagggggcttgtggccacccagtcctggcacctgacctacaagtttgccatcttcattcccccttcttctgttcatcagccccctcctctatcctcccaccctcacagttttccttgtatatgaaatcttcgttcttgtccttttgcccatgcgcatttcctgcctcctcagggaggtcgggacagcagacctgtgtgttaaacatcaatgtgaagttatttccaggaagaagtttcacctgtgatttcctcttccccagagccccacagtcttcgttacaacctcatggtgctgtcccaggatggatctgtgcagtcagggtttctcgctgagggacatctggatggtcagcccttcctgcgctatgacaggcagaaacgcagggcaaagccccagggacagtgggcagaaaatgtcctgggagctaagacctgggacacagagaccgaggacttgacagagaatgggcaagacctcaggaggaccctgactcatatcaaggaccagaaaggaggtgagagtcggcaggggcaagagtaatgggaggccttctccaggaaagttggagacagagagcagggacctgtctcttcccgctggatctggctgggggtggggatgaggaatagggtcagggaggctcagcagggtggtgagccggaactcagcccacacagggaggcatggaggagggccagggaggggtcgctgctgggctgagttcctcacttgggtggaaaggtgatgggttcgggaatggagaagtcactgctgggtgggggcaggcttgcattccctccaggagattagggtctgtgagatccatgaagacagcagcaccaggggctcccggcatttctactacgatggggagctcttcctctcccaaaacctggagactcaagaatcgacagtgccccagtcctccagagctcagaccttggctatgaacgtcacaaatttctggaaggaagatgccatgaagaccaagacacactatcgcgctatgcaggcagactgcctgcagaaactacagcgatatctgaaatccggggtggccatcaggagaacaggtaccgaccctggccaggggctctactgttcccgcaattctgctagagttgcctcgcctcccagctctgtccggggaaaccctccctgtgctatggatgcaggcgtttcctgttggcatattgtgtcctgatttgcctctcctgttagagccattggataaagacagtgggtctgggactgaactgtccagtgttgtaatctgggaaagcagtgggccctctgacagaagcctgagcctggtgtgggagttaggcaggagaggaagccctcagggccagggctgccccctctgcctcccggcctgcccatcccggagagttccctcctggccccatgacccaggagtccacccttgacatccccctcctcagcatcaatgtggggatcccagagcctgaggccacagtcccaaggcccatcctcctgctagcctggaggaattaggccccagggtgaggacagacttacagaaggtccggtatctgtgagggattcagccagagtgagaacagtggagaggagcagccctgttccctgcatctcccttagaggggagcagggcttcactggctctgccctttcttctccagtgccccccatggtgaatgtcacctgcagcgaggtctcagagggcaacatcaccgtgacatgcagggcttccagcttctatccccggaatatcacactgacctggcgtcaggatggggtatctttgagccacaacacccagcagtggggggatgtcctgcctgatgggaatggaacctaccagacctgggtggccaccaggattcgccaaggagaggagcagaggttcacctgctacatggaacacagcgggaatcacggcactcaccctgtgccctctggtgagcctggggtgaccctggagagggtcaggccagggtaggaacagcaaggacggctgtggctctctgcccagtgtataacaagtccctttttttcagggaaggcgctggtgcttcagagtcaacggacagactttccatatgtttctgctgctatgccatgttttgttattattattattctctgtgtcccttgttgcaagaagaaaacatcagcggcagagggtccaggtgagaaaaggggacagtttctggagatgggaaagctcctttctaggcagtagggtctcctcattgctcctgcccagacaagacgtaggtgacaaggctgctgggacaggggatggaagctggggtatttgggaggggaatgggagctgcatctccatctacacccataagtgcttcccaagccagggctggggcaaggccttcgaatatccagctgtggcctcctcctgctgcaagtgaggagtgggcagcagggagggctgtggcacctgctctgtccccatcccagcctctctgtctctcgggctcactagggtgcgtccaggtggggtgagttgggaatcacgtgctgattgctgagggcctggatgatcatggtgtcagagggaggaaatagtaaaggtggctgtgatctggggagggccagaaactggagaggaatccaaggagaggcgatgcccacccgtgtgcctcctccaggaggcactttccaggttcccactacctggcctccctgagtttccttgcagatgacacagatgaatagataagcagatgtccctgggccatttgaggagcggggcccagcccctcatcagggcagatgtggtccctgttttcatcctacctccagcgtgttttcttctgcagtccctgagggacacagtccccaggcgccatctctttgaggctttgttctgtgctctgtggccttaccttgccctccctgagccaatttccctttctcaaggtggtcactgcctggtaagtttggagtaagggacagtcagaagcatttcccccacagtcaggttgtttgatgggagatgaaaagagacagcagaagttttgtgtttctgcaaaaacagaggcagtgcaggggacagtgagaggctggggtgtccaggagacctgagtctggcggtaggggcgctggtttctcatccttgaacctagttgcactgtcagtcggcccctcatgcctgagcagatgggaaggttcgtcccctgccctgcagcaagagggccccatccaggaggcacccacagcaggggcagtgcaggtctgtggtcactcctgctctcacctgcggcgtctcccgtggagggattgtcacttctggttccctgtgggcaggaatggtttcctcgtaggtcactggggttttggccaggaaaagggtatgaaattcatgtgccagtttctcaaaattcctgctttcaatgttgatgtccaataaagatgttcgtaatttcagctctataatcttaataggatttcctctaatactgctgttgtaaagcatattaaataaaacaggaactcaaatttggagccccctctccagaagggtctgtgtggagatggtggctgtggcagcggcagttcccaggtgcagagggtgggcagaggcagcctcaggctaaggggtctcccctactccacgtggagaaaagtccttgtaggttgcaagggcagtggcctgggtggaatccctgctagggacagagcaggaaggcctcacagcctcaccaagcagcagccctggggtgaagtaagtggaccaggagtaagtggaccaggcaggagcagtagtgactcaacagcaggtcacaggcctaggtgggtgctgaaggtcatgggaggccaggcctcctcgagcaaggtggggggtcccagggtcaggtcaggtgcagatcctgtggcagccacgtctttccatgctgggcctgctgggccccccaggcttcctgatggggtccccagttaggagctgcctgctcagggctgggaggggaggagtgctgagctgcagatagagggcagggcccacagtgggcagggcctgccctggtgtgcaggtgcctctgcaggagagaagggcctggggactgagagcaagggtcagggcctctctttggggaggcctctcactgtaacaggactggtcaggcctgagaggagggcactgggttccctcttgggtcttgtccttttgtcttggggccctttcactccctgcacggtgagtggtgggcacaggacaggggctgatgttgatggagtgatgggagagaactgacaggggctgggaaaagcaaggagggaggaagaaaaaagtgggggcctcatcttctctcagagaaagggcgaatctgattttggggcaactgaagagagaaaagtccttagggaataaacacaacactgcacccagtggagcatttacccgtttccctcttctccagagcttgtgagcctgcaggtcctggatcaacacccagttgggacaggagaccacagggatgcagcacagctgggatttcagcctctgatgtcagctactgggtccactggttccactgagggcacctagactctacagccaggcggccaggattcaactccctgcctggatctcaccagcactttccctctgtttcctgacctatgaaacagagaaaataacatcacttatttattgttgttggatgctgcaaagtgttagtaggtatgaggtgtttgctgctctgccacgtagagagccagcaaagggatcatgaccaactcaacattccattggaggctatatgatcaaacagcaaattgtttatcatgaatgcaggatgtgggcaaactcacgactgctcctgccaacagaaggtttgctgagggcattcactccatggtgctcattggagttatctactgggtcatctagagcctattgtttgaggaatgcagtcttacaagcctactctggacccagcagctgactccttcttccacccctcttcttgctatctcctataccaataaatacgaagggctgtggaagatcagagcccttgttcacgagaagcaagaagccccctgaccccttgttccaaatatactcttttgtctttctctttattcccacgttcgccctttgttcagtccaatacagggttgtggggcccttaacagtgccatattaattggtatcattatttctgttgtttttgtttttgtttttgtttttgtttttgagacagagtctcactctgtcacccaggctgcagttcactggtgtgatctcagctcactgcaacctctgcctcccaggttcaagcacttctcgtacctcagactcccgaatagctgggattacagacaggcaccaccacacccagctaatttttgtattttttgtagagacggggtttcgccaagttgaccagcccagtttcaaactcctgacctcaggtgatctgcctgccttggcatcccaaagtgctgggattacaagaatgagccaccgtgcctggcctattttattatattgtaatatattttattatattagccaccatgcctgtcctattttcttatgttttaatatattttaatatattacatgtgcagtaattagattatcatgggtgaactttatgagtgagtatcttggtgatgactcctcctgaccagcccaggaccagctttcttgtcaccttgaggtcccctcgccccgtcacaccgttatgcattactctgtgtctactattatgtgtgcataatttataccgtaaatgtttactctttaaataga

SEQ ID NO: 33 - DNA, 2426 bp, Homo sapiens
gaattttgtgagcgaccgcgctgggccgtttctctttcttttccggaccctgcagtggcgcctaaagtctgcgaggaggaagtcgcctctgtgctcgtgagtccagggatctaagagccccacagtcttcgttacaacctcatggtgctgtcccaggatggatctgtgcagtcagggtttctcgctgagggacatctggatggtcagcccttcctgcgctatgacaggcagaaacgcagggcaaagccccagggacagtgggcagaaaatgtcctgggagctaagacctgggacacagagaccgaggacttgacagagaatgggcaagacctcaggaggaccctgactcatatcaaggaccagaaaggaggcttgcattccctccaggagattagggtctgtgagatccatgaagacagcagcaccaggggctcccggcatttctactacgatggggagctcttcctctcccaaaacctggagactcaagaatcgacagtgccccagtcctccagagctcagaccttggctatgaacgtcacaaatttctggaaggaagatgccatgaagaccaagacacactatcgcgctatgcaggcagactgcctgcagaaactacagcgatatctgaaatccggggtggccatcaggagaacagtgccccccatggtgaatgtcacctgcagcgaggtctcagagggcaacatcaccgtgacatgcagggcttccagcttctatccccggaatatcacactgacctggcgtcaggatggggtatctttgagccacaacacccagcagtggggggatgtcctgcctgatgggaatggaacctaccagacctgggtggccaccaggattcgccaaggagaggagcagaggttcacctgctacatggaacacagcgggaatcacggcactcaccctgtgccctctgggaaggcgctggtgcttcagagtcaacggacagactttccatatgtttctgctgctatgccatgttttgttattattattattctctgtgtcccttgttgcaagaagaaaacatcagcggcagagggtccagagcttgtgagcctgcaggtcctggatcaacacccagttgggacaggagaccacagggatgcagcacagctgggatttcagcctctgatgtcagctactgggtccactggttccactgagggcacctagactctacagccaggcggccaggattcaactccctgcctggatctcaccagcactttccctctgtttcctgacctatgaaacagagaaaataacatcacttatttattgttgttggatgctgcaaagtgttagtaggtatgaggtgtttgctgctctgccacgtagagagccagcaaagggatcatgaccaactcaacattccattggaggctatatgatcaaacagcaaattgtttatcatgaatgcaggatgtgggcaaactcacgactgctcctgccaacagaaggtttgctgagggcattcactccatggtgctcattggagttatctactgggtcatctagagcctattgtttgaggaatgcagtcttacaagcctactctggacccagcagctgactccttcttccacccctcttcttgctatctcctataccaataaatacgaagggctgtggaagatcagagcccttgttcacgagaagcaagaagccccctgaccccttgttccaaatatactcttttgtctttctctttattcccacgttcgccctttgttcagtccaatacagggttgtggggcccttaacagtgccatattaattggtatcattatttctgttgtttttgtttttgtttttgtttttgtttttgagacagagtctcactctgtcacccaggctgcagttcactggtgtgatctcagctcactgcaacctctgcctcccaggttcaagcacttctcgtacctcagactcccgaatagctgggattacagacaggcaccaccacacccagctaatttttgtattttttgtagagacggggtttcgccaagttgaccagcccagtttcaaactcctgacctcaggtgatctgcctgccttggcatcccaaagtgctgggattacaagaatgagccaccgtgcctggcctattttattatattgtaatatattttattatattagccaccatgcctgtcctattttcttatgttttaatatattttaatatattacatgtgcagtaattagattatcatgggtgaactttatgagtgagtatcttggtgatgactcctcctgaccagcccaggaccagctttcttgtcaccttgaggtcccctcgccccgtcacaccgttatgcattactctgtgtctactattatgtgtgcataatttataccgtaaatgtttactctttaaatagaaaaaaaaaaaaaaa

SEQ ID NO: 34 - protein, 351 aa, Homo sapiens
MVLSQDGSVQSGFLAEGHLDGQPFLRYDRQKRRAKPQGQWAENVLGAKTWDTETEDLTENGQDLRRTLTHIKDQKGGLHSLQEIRVCEIHEDSSTRGSRHFYYDGELFLSQNLETQESTVPQSSRAQTLAMNVTNFWKEDAMKTKTHYRAMQADCLQKLQRYLKSGVAIRRTVPPMVNVTCSEVSEGNITVTCRASSFYPRNITLTWRQDGVSLSHNTQQWGDVLPDGNGTYQTWVATRIRQGEEQRFTCYMEHSGNHGTHPVPSGKALVLQSQRTDFPYVSAAMPCFVIIIILCVPCCKKKTSAAEGPELVSLQVLDQHPVGTGDHRDAAQLGFQPLMSATGSTGSTEGT

SEQ ID NO: 35 - DNA, 20 bp, Artificial Sequence
  Description of Artificial Sequence: Synthetic primer
cgcctagagaagaggctgtg

SEQ ID NO: 36 - DNA, 20 bp, Artificial Sequence
  Description of Artificial Sequence: Synthetic primer
ctgctgtggctgtggtgtag

SEQ ID NO: 37 - DNA, 1341 bp, Sus scrofa
ggaactcggagaggtctccgctaggctggtgtcgggttacctgctcatcttcccgaaaatgatggcgttttgcgcgctgcgcaaggcacttccctgccgtcccgagaatcccttttcttcgaggtgcttcgttgagattctttgggtgtcgttggccctagtgttcctgcttcccatgccctcagatgcctgtgatgagccaccgaagtttgaaagcatgcggccccaatttttgaataccacttacagacctggagaccgtgtagagtatgaatgtcgccccgggttccagcccatggttcctgcgcttcccaccttttccgtctgtcaggacgataatacgtggtcacccctccaggaggcttgtcgacgaaaagcctgttcgaatctaccagacccgttaaatggccaagttagctacccaaatggggatatgctgtttggttcaaaggctcagtttacctgtaacactggtttttacataattggagccgagactgtgtattgtcaggtttctgggaatgttatggcctggagtgagccctccccgctatgtgagaagattttgtgtaaaccacctggcgaaattccaaatggaaaatacaccaatagccataaggatgtatttgaatacaatgaagtagtaacttacagttgtctttcttcaactggaccggatgaattttcacttgttggagagagcagccttttttgtattgggaaggacgagtggagtagtgacccccctgagtgtaaagtggtcaaatgtccatatccagtagtcccaaatggagaaattgtatcaggatttggatcaaaattttactacaaagcagaggttgtatttaaatgcaatgctggttttacccttcatggcagagacacaattgtctgcggtgcaaacagcacgtgggagcctgagatgccccaatgtatcaaagattccaagcctactgatccacctgcaaccccaggaccaagccatccaggacctcccagtcccagtgatgcatcaccacctaaagatgctgagagtttagatggaggaatcatcgctgcaattgttgtgggcgtcttagctgccattgcagtaattgctggtggtgtatacttttttcatcataaatacaacaagaaaaggtcgaagtaaaactgatgtgcttaaagtaaaagttgctgagaggacgtggaatccagccccttccctctcctgtgctgctgcctgggtcccgttttgcatgtcatgactgtgtgcttccaaaaaatgccttttgttcgtatttttttgcctaaacgcatgattttgtctctacttgaattaaatcatcactgaatccacgc

SEQ ID NO: 38 - DNA, 1546 bp, Sus scrofa
cggcacgagatttcgtcttaatcgcggaggtcgcagagtccgggagccgctcggggtccccgttcccgcgcgccatgagtcccctgccgcggagcgcccccgcggtgaggcgcctaatgggcggacagacgccgccgccgctgctgctgctgctgctgctgctgtgtatcccggctgcgcagggtgactgcagccttccacccgatgtacctaatgcccaaccagatttgcgaggtcttgcaagttttcctgaacaaaccacaataacatacaaatgtaacaaaggctttgtcaaagttcctggcatggcagactcagtgctctgtcttaatgataaatggtcagaagttgcagaattttgtaatcgtagctgtgatgttccaaccaggctacattttgcatctcttaaaaagtcttacagcaaacagaattatttcccagagggtttcaccgtggaatatgagtgccgtaagggctataaaagggatcttactctatcagaaaaactaacttgccttcagaattttacgtggtccaaacctgatgaattttgcaaaaaaaaacaatgtccgactcctggagaactaaaaaatggtcatgtcaatataacaactgacttgttatttggcgcatccatctttttctcatgtaacgcagggtacagactagttggtgcaacttctagttactgttttgccatagcaaatgatgttgagtggagtgatccattgccagaatgccaagaaatttctccaactgtcaaagccataccagctgttgagaaacccatcacagtaaattttccagcaacaaagtatccagctattcccagggccacaacgagttttcattcaagtacatctaaaaatcgaggaaacccttcttcaggcatgagaatcatgtcgtctggtaccatgctacttattgcaggaggtgttgctgttattataataattgttgccctaattctagccaaaggtttctggcactatggaaaatcaggctcttaccacactcatgagaacaacaaagccgttaatgttgcattttataatttacctgcgactggcgatgccgcagatgtaagacctggtaattaacaaaaggacggtgcatgtgtaacactgacagttttgcttatggtgctagtaaccattggctagctgacttagccaaagaagagttaagaagaaagtgcacacaagtacacagaatattttcagtttcttagaactttcaggtggagtggacatagtttgtggatagtgttcttcgttttgcatgttttcattgtctctaaggtacataggaatgtcacagaaccaaagagaaacaaatctatcctgaaattacatcctcaacactcctaagactcttgaaaatagaacagctcataagattgagagcaattactttccaaaaagggtgagaaaatggagagatttgttcatggttagaatataagaaaaaagaaaacaaaaaggtgatttttcccaccaaatgtgtaatgttatttttattaataaaggaaaaaaaaaaaaaaaaa

SEQ ID NO: 39 - DNA, 773 bp, Sus scrofa
gaaaagacgcgcaggccgggccgctctcccgacggggagtagcgctgcagccggacgcagggtgcagttagaatccatagacggtcacgatgggaagcaaaggagggttcattttgctctggctcctgtccatcctggctgttctctgccacttaggtcacagcctgcagtgctataactgtatcaacccagctggtagctgcactacggccatgaattgttcacataatcaggatgcctgtatcttcgttgaagccgtgccacccaaaacttactaccagtgttggaggttcgatgaatgcaatttcgatttcatttcgagaaacctagcggagaagaagctgaagtacaactgctgccggaaggacctgtgtaacaagagtgatgccacgatttcatcagggaaaaccgctctgctggtgatcctgctgctggtagcaacctggcacttttgtctctaactgtacaccaggagagtttctcctcaacttcctctgtctctctgttcctatttcccatgctgcggtgttccaaaggctgtgtatgctccagcttcttcctgttgggaaggactaaacctagcttgagcactttggattagagagagaaactttgagcgactttgaagaccaggcctgttggcagagaagacctgtcagaggggaaacgttttaagagtgaagcacaggtgatttgagcgaggcctatgcgtcttcctctgctcttggcaggaccagctttgcggtaaccattcgatagattccacaatcctt

SEQ ID NO: 40 - DNA, 261 bp, Sus scrofa
tcaaggggccagcacgcgatcctgccgctcgttcgatctagcacacccacgggtctgctgtgtgggatttcgactcgcgggatccgatcgcacgtccggaggacacagcagcgggagctccgggtcggtcaccgcagttctggccgcctctcggtcctcccgttcccttttatggatctccgcgcagacatcgccatacgtccggtgtgtgcaccgcgaagaatccagaaacatgtccgtcgttttcagggcccaagacat

SEQ ID NO: 41 - DNA, 1578 bp, Homo sapiens
agtgtggtactttgtcttgaggagatgtcctggactcacacggaaacttagggctacggaatgaagttctcactcccattaggtgacaggtttttagagaagccaatcagcgtcgccgcggtcctggttctaaagtcctcgctcacccacccggactcattctccccagacgccaaggatggtggtcatggcgccccgaaccctcttcctgctgctctcgggggccctgaccctgaccgagacctgggcgggctcccactccatgaggtatttcagcgccgccgtgtcccggcccggccgcggggagccccgcttcatcgccatgggctacgtggacgacacgcagttcgtgcggttcgacagcgactcggcgtgtccgaggatggagccgcgggcgccgtgggtggagcaggaggggccggagtattgggaagaggagacacggaacaccaaggcccacgcacagactgacagaatgaacctgcagaccctgcgcggctactacaaccagagcgaggccagttctcacaccctccagtggatgattggctgcgacctggggtccgacggacgcctcctccgcgggtatgaacagtatgcctacgatggcaaggattacctcgccctgaacgaggacctgcgctcctggaccgcagcggacactgcggctcagatctccaagcgcaagtgtgaggcggccaatgtggctgaacaaaggagagcctacctggagggcacgtgcgtggagtggctccacagatacctggagaacgggaaggagatgctgcagcgcgcggacccccccaagacacacgtgacccaccaccctgtctttgactatgaggccaccctgaggtgctgggccctgggcttctaccctgcggagatcatactgacctggcagcgggatggggaggaccagacccaggacgtggagctcgtggagaccaggcctgcaggggatggaaccttccagaagtgggcagctgtggtggtgccttctggagaggagcagagatacacgtgccatgtgcagcatgaggggctgccggagcccctcatgctgagatggaagcagtcttccctgcccaccatccccatcatgggtatcgttgctggcctggttgtccttgcagctgtagtcactggagctgcggtcgctgctgtgctgtggagaaagaagagctcagattgaaaaggagggagctactctcaggctgcaatgtgaaacagctgccctgtgtgggactgagtggcaagtccctttgtgacttcaagaaccctgactcctctttgtgcagagaccagcccacccctgtgcccaccatgaccctcttcctcatgctgaactgcattccttccccaatcacctttcctgttccagaaaaggggctgggatgtctccgtctctgtctcaaatttgtggtccactgagctataacttacttctgtattaaaattagaatctgagtataaatttactttttcaaattatttccaagagagattgatgggttaattaaaggagaagattcctgaaatttgagagacaaaataaatggaagacatgagaacttt

SEQ ID NO: 42 - DNA, 2679 bp, Homo sapiens
gcagactcagttctcattcccaatgggtgtcgggtttctagagaagccaatcagcgtcgccacgactcccgactataaagtccccatccggactcaagaagttctcaggactcagaggctgggatcatggtagatggaaccctccttttactcctctcggaggccctggcccttacccagacctgggcgggctcccactccttgaagtatttccacacttccgtgtcccggcccggccgcggggagccccgcttcatctctgtgggctacgtggacgacacccagttcgtgcgcttcgacaacgacgccgcgagtccgaggatggtgccgcgggcgccgtggatggagcaggaggggtcagagtattgggaccgggagacacggagcgccagggacaccgcacagattttccgagtgaatctgcggacgctgcgcggctactacaatcagagcgaggccgggtctcacaccctgcagtggatgcatggctgcgagctggggcccgacgggcgcttcctccgcgggtatgaacagttcgcctacgacggcaaggattatctcaccctgaatgaggacctgcgctcctggaccgcggtggacacggcggctcagatctccgagcaaaagtcaaatgatgcctctgaggcggagcaccagagagcctacctggaagacacatgcgtggagtggctccacaaatacctggagaaggggaaggagacgctgcttcacctggagcccccaaagacacacgtgactcaccaccccatctctgaccatgaggccaccctgaggtgctgggccctgggcttctaccctgcggagatcacactgacctggcagcaggatggggagggccatacccaggacacggagctcgtggagaccaggcctgcaggggatggaaccttccagaagtgggcagctgtggtggtgccttctggagaggagcagagatacacgtgccatgtgcagcatgaggggctacccgagcccgtcaccctgagatggaagccggcttcccagcccaccatccccatcgtgggcatcattgctggcctggttctccttggatctgtggtctctggagctgtggttgctgctgtgatatggaggaagaagagctcaggtggaaaaggagggagctactctaaggctgagtggagcgacagtgcccaggggtctgagtctcacagcttgtaaagcctgagacagctgccttgtgtgcgactgagatgcacagctgccttgtgtgcgactgagatgcaggatttcctcacgcctcccctatgtgtcttaggggactctggcttctctttttgcaagggcctctgaatctgtctgtgtccctgttagcacaatgtgaggaggtagagaaacagtccacctctgtgtctaccatgacccccttcctcacactgacctgtgttccttccctgttctcttttctattaaaaataagaacctgggcagagtgcggcagctcatgcctgtaatcccagcacttagggaggccgaggagggcagatcacgaggtcaggagatcgaaaccatcctggctaacacggtgaaaccccgtctctactaaaaaatacaaaaaattagctgggcgcagaggcacgggcctgtagtcccagctactcaggaggcggaggcaggagaatggcgtcaacccgggaggcggaggttgcagtgagccaggattgtgcgactgcactccagcctgggtgacagggtgaaacgccatctcaaaaaataaaaattgaaaaataaaaaaagaacctggatctcaatttaatttttcatattcttgcaatgaaatggacttgaggaagctaagatcatagctagaaatacagataattccacagcacatctctagcaaatttagcctattcctattctctagcctattccttaccacctgtaatcttgaccatataccttggagttgaatattgttttcatactgctgtggtttgaatgttccctccaacactcatgttgagacttaatccctaatgtggcaatactgaaaggtggggcctttgagatgtgattggatcgtaaggctgtgccttcattcatgggttaatggattaatgggttatcacaggaatgggactggtggctttataagaagaggaaaagagaactgagctagcatgcccagcccacagagagcctccactagagtgatgctaagtggaaatgtgaggtgcagctgccacagagggcccccaccagggaaatgtctagtgtctagtggatccaggccacaggagagagtgccttgtggagcgctgggagcaggacctgaccaccaccaggaccccagaactgtggagtcagtggcagcatgcagcgcccccttgggaaagctttaggcaccagcctgcaacccattcgagcagccacgtaggctgcacccagcaaagccacaggcacggggctacctgaggccttgggggcccaatccctgctccagtgtgtccgtgaggcagcacacgaagtcaaaagagattattctcttcccacagataccttttctctcccatgaccctttaacagcatctgcttcattcccctcaccttcccaggctgatctgaggtaaactttgaagtaaaataaaagctgtgtttgagcatcatttgtatttcaaaaaaaaaaaaaaaaaa

SEQ ID NO: 43 - DNA, 987 bp, Homo sapiens
aatataagtggaggcgtcgcgctggcgggcattcctgaagctgacagcattcgggccgagatgtctcgctccgtggccttagctgtgctcgcgctactctctctttctggcctggaggctatccagcgtactccaaagattcaggtttactcacgtcatccagcagagaatggaaagtcaaatttcctgaattgctatgtgtctgggtttcatccatccgacattgaagttgacttactgaagaatggagagagaattgaaaaagtggagcattcagacttgtctttcagcaaggactggtctttctatctcttgtactacactgaattcacccccactgaaaaagatgagtatgcctgccgtgtgaaccatgtgactttgtcacagcccaagatagttaagtgggatcgagacatgtaagcagcatcatggaggtttgaagatgccgcatttggattggatgaattccaaattctgcttgcttgctttttaatattgatatgcttatacacttacactttatgcacaaaatgtagggttataataatgttaacatggacatgatcttctttataattctactttgagtgctgtctccatgtttgatgtatctgagcaggttgctccacaggtagctctaggagggctggcaacttagaggtggggagcagagaattctcttatccaacatcaacatcttggtcagatttgaactcttcaatctcttgcactcaaagcttgttaagatagttaagcgtgcataagttaacttccaatttacatactctgcttagaatttgggggaaaatttagaaatataattgacaggattattggaaatttgttataatgaatgaaacattttgtcatataagattcatatttacttcttatacatttgataaagtaaggcatggttgtggttaatctggtttatttttgttccacaagttaaataaatcataaaacttgatgtgttatctctta

SEQ ID NO: 44 - DNA, 3349 bp, Homo sapiens
ggcgcaacgctgagcagctggcgcgtcccgcgcggccccagttctgcgcagcttcccgaggctccgcaccagccgcgcttctgtccgcctgcagggcattccagaaagatgaggatatttgctgtctttatattcatgacctactggcatttgctgaacgccccatacaacaaaatcaaccaaagaattttggttgtggatccagtcacctctgaacatgaactgacatgtcaggctgagggctaccccaaggccgaagtcatctggacaagcagtgaccatcaagtcctgagtggtaagaccaccaccaccaattccaagagagaggagaagcttttcaatgtgaccagcacactgagaatcaacacaacaactaatgagattttctactgcacttttaggagattagatcctgaggaaaaccatacagctgaattggtcatcccagaactacctctggcacatcctccaaatgaaaggactcacttggtaattctgggagccatcttattatgccttggtgtagcactgacattcatcttccgtttaagaaaagggagaatgatggatgtgaaaaaatgtggcatccaagatacaaactcaaagaagcaaagtgatacacatttggaggagacgtaatccagcattggaacttctgatcttcaagcagggattctcaacctgtggtttaggggttcatcggggctgagcgtgacaagaggaaggaatgggcccgtgggatgcaggcaatgtgggacttaaaaggcccaagcactgaaaatggaacctggcgaaagcagaggaggagaatgaagaaagatggagtcaaacagggagcctggagggagaccttgatactttcaaatgcctgaggggctcatcgacgcctgtgacagggagaaaggatacttctgaacaaggagcctccaagcaaatcatccattgctcatcctaggaagacgggttgagaatccctaatttgagggtcagttcctgcagaagtgccctttgcctccactcaatgcctcaatttgttttctgcatgactgagagtctcagtgttggaacgggacagtatttatgtatgagtttttcctatttattttgagtctgtgaggtcttcttgtcatgtgagtgtggttgtgaatgatttcttttgaagatatattgtagtagatgttacaattttgtcgccaaactaaacttgctgcttaatgatttgctcacatctagtaaaacatggagtatttgtaaggtgcttggtctcctctataactacaagtatacattggaagcataaagatcaaaccgttggttgcataggatgtcacctttatttaacccattaatactctggttgacctaatcttattctcagacctcaagtgtctgtgcagtatctgttccatttaaatatcagctttacaattatgtggtagcctacacacataatctcatttcatcgctgtaaccaccctgttgtgataaccactattattttacccatcgtacagctgaggaagcaaacagattaagtaacttgcccaaaccagtaaatagcagacctcagactgccacccactgtccttttataatacaatttacagctatattttactttaagcaattcttttattcaaaaaccatttattaagtgcccttgcaatatcaatcgctgtgccaggcattgaatctacagatgtgagcaagacaaagtacctgtcctcaaggagctcatagtataatgaggagattaacaagaaaatgtattattacaatttagtccagtgtcatagcataaggatgatgcgaggggaaaacccgagcagtgttgccaagaggaggaaataggccaatgtggtctgggacggttggatatacttaaacatcttaataatcagagtaattttcatttacaaagagaggtcggtacttaaaataaccctgaaaaataacactggaattccttttctagcattatatttattcctgatttgcctttgccatataatctaatgcttgtttatatagtgtctggtattgtttaacagttctgtcttttctatttaaatgccactaaattttaaattcatacctttccatgattcaaaattcaaaagatcccatgggagatggttggaaaatctccacttcatcctccaagccattcaagtttcctttccagaagcaactgctactgcctttcattcatatgttcttctaaagatagtctacatttggaaatgtatgttaaaagcacgtatttttaaaatttttttcctaaatagtaacacattgtatgtctgctgtgtactttgctatttttatttattttagtgtttcttatatagcagatggaatgaatttgaagttcccagggctgaggatccatgccttctttgtttctaagttatctttcccatagcttttcattatctttcatatgatccagtatatgttaaatatgtcctacatatacatttagacaaccaccatttgttaagtatttgctctaggacagagtttggatttgtttatgtttgctcaaaaggagacccatgggctctccagggtgcactgagtcaatctagtcctaaaaagcaatcttattattaactctgtatgacagaatcatgtctggaacttttgttttctgctttctgtcaagtataaacttcactttgatgctgtacttgcaaaatcacattttctttctggaaattccggcagtgtaccttgactgctagctaccctgtgccagaaaagcctcattcgttgtgcttgaacccttgaatgccaccagctgtcatcactacacagccctcctaagaggcttcctggaggtttcgagattcagatgccctgggagatcccagagtttcctttccctcttggccatattctggtgtcaatgacaaggagtaccttggctttgccacatgtcaaggctgaagaaacagtgtctccaacagagctccttgtgttatctgtttgtacatgtgcatttgtacagtaattggtgtgacagtgttctttgtgtgaattacaggcaagaattgtggctgagcaaggcacatagtctactcagtctattcctaagtcctaactcctccttgtggtgttggatttgtaaggcactttatcccttttgtctcatgtttcatcgtaaatggcataggcagagatgatacctaattctgcatttgattgtcactttttgtacctgcattaatttaataaaatattcttatttattttgttacttggtacaccagcatgtccattttcttgtttattttgtgtttaataaaatgttcagtttaacatcccagtggagaaagttaaaaaa

SEQ ID NO: 45 - DNA, 2418 bp, Homo sapiens
gcaaaccttaagctgaatgaacaacttttcttctcttgaatatatcttaacgccaaattttgagtgcttttttgttacccatcctcatatgtcccagctagaaagaatcctgggttggagctactgcatgttgattgttttgtttttccttttggctgttcattttggtggctactataaggaaatctaacacaaacagcaactgttttttgttgtttacttttgcatctttacttgtggagctgtggcaagtcctcatatcaaatacagaacatgatcttcctcctgctaatgttgagcctggaattgcagcttcaccagatagcagctttattcacagtgacagtccctaaggaactgtacataatagagcatggcagcaatgtgaccctggaatgcaactttgacactggaagtcatgtgaaccttggagcaataacagccagtttgcaaaaggtggaaaatgatacatccccacaccgtgaaagagccactttgctggaggagcagctgcccctagggaaggcctcgttccacatacctcaagtccaagtgagggacgaaggacagtaccaatgcataatcatctatggggtcgcctgggactacaagtacctgactctgaaagtcaaagcttcctacaggaaaataaacactcacatcctaaaggttccagaaacagatgaggtagagctcacctgccaggctacaggttatcctctggcagaagtatcctggccaaacgtcagcgttcctgccaacaccagccactccaggacccctgaaggcctctaccaggtcaccagtgttctgcgcctaaagccaccccctggcagaaacttcagctgtgtgttctggaatactcacgtgagggaacttactttggccagcattgaccttcaaagtcagatggaacccaggacccatccaacttggctgcttcacattttcatccccttctgcatcattgctttcattttcatagccacagtgatagccctaagaaaacaactctgtcaaaagctgtattcttcaaaagacacaacaaaaagacctgtcaccacaacaaagagggaagtgaacagtgctatctgaacctgtggtcttgggagccagggtgacctgatatgacatctaaagaagcttctggactctgaacaagaattcggtggcctgcagagcttgccatttgcacttttcaaatgcctttggatgacccagcactttaatctgaaacctgcaacaagactagccaacacctggccatgaaacttgccccttcactgatctggactcacctctggagcctatggctttaagcaagcactactgcactttacagaattaccccactggatcctggacccacagaattccttcaggatccttcttgctgccagactgaaagcaaaaggaattatttcccctcaagttttctaagtgatttccaaaagcagaggtgtgtggaaatttccagtaacagaaacagatgggttgccaatagagttattttttatctatagcttcctctgggtactagaagaggctattgagactatgagctcacagacagggcttcgcacaaactcaaatcataattgacatgttttatggattactggaatcttgatagcataatgaagttgttctaattaacagagagcatttaaatatacactaagtgcacaaattgtggagtaaagtcatcaagctctgtttttgaggtctaagtcacaaagcatttgttttaacctgtaatggcaccatgtttaatggtggttttttttttgaactacatctttcctttaaaaattattggtttctttttatttgtttttaccttagaaatcaattatatacagtcaaaaatatttgatatgctcatacgttgtatctgcagcaatttcagataagtagctaaaatggccaaagccccaaactaagcctccttttctggccctcaatatgactttaaatttgacttttcagtgcctcagtttgcacatctgtaatacagcaatgctaagtagtcaaggcctttgataattggcactatggaaatcctgcaagatcccactacatatgtgtggagcagaagggtaactcggctacagtaacagcttaattttgttaaatttgttctttatactggagccatgaagctcagagcattagctgacccttgaactattcaaatgggcacattagctagtataacagacttacataggtgggcctaaagcaagctccttaactgagcaaaatttggggcttatgagaatgaaagggtgtgaaattgactaacagacaaatcatacatctcagtttctcaattctcatgtaaatcagagaatgcctttaaagaataaaactcaattgttattcttcaacgttctttatatattctacttttgggta

SEQ ID NO: 46 - DNA, 4167 bp, Homo sapiens
agcgggagtccgcggcgagcgcagcagcagggccgggtcctgcgcctcgggggtcggcgtccaggctcggagcgcggcacggagacggcggcagcgctggactaggtggcaggccctgcatcatggaaactctttctaatgcaagtggtacttttgccatacgccttttaaagatactgtgtcaagataacccttcgcacaacgtgttctgttctcctgtgagcatctcctctgccctggccatggttctcctaggggcaaagggaaacaccgcaacccagatggcccaggcactgtctttaaacacagaggaagacattcatcgggctttccagtcgcttctcactgaagtgaacaaggctggcacacagtacctgctgagaacggccaacaggctctttggagagaaaacttgtcagttcctctcaacgtttaaggaatcctgtcttcaattctaccatgctgagctgaaggagctttcctttatcagagctgcagaagagtccaggaaacacatcaacacctgggtctcaaaaaagaccgaaggtaaaattgaagagttgttgccgggtagctcaattgatgcagaaaccaggctggttcttgtcaatgccatctacttcaaaggaaagtggaatgaaccgtttgacgaaacatacacaagggaaatgccctttaaaataaaccaggaggagcaaaggccagtgcagatgatgtatcaggaggccacgtttaagctcgcccacgtgggcgaggtgcgcgcgcagctgctggagctgccctacgccaggaaggagctgagcctgctggtgctgctgcctgacgacggcgtggagctcagcacggtggaaaaaagtctcacttttgagaaactcacagcctggaccaagccagactgtatgaagagtactgaggttgaagttctccttccaaaatttaaactacaagaggattatgacatggaatctgtgcttcggcatttgggaattgttgatgccttccaacagggcaaggctgacttgtcggcaatgtcagcggagagagacctgtgtctgtccaagttcgtgcacaagagttttgtggaggtgaatgaagaaggcaccgaggcagcggcagcgtcgagctgctttgtagttgcagagtgctgcatggaatctggccccaggttctgtgctgaccaccctttccttttcttcatcaggcacaacagagccaacagcattctgttctgtggcaggttctcatcgccataaagggtgcacttaccgtgcactcggccatttccctcttcctgtgtccccagatccccactacagctccaagaggatgggcctagaaagccaagtgcaaagatgagggcagattctttacctgtctgccctcatgatttgccagcatgaattcatgatgctccacactcgcttatgctacttaatcagaatcttgagaaaatagaccataatgattccctgttgtattaaaattgcagtccaaatcccataggatggcaagcaaagttcttctagaattccacatgcaattcactctggcgaccctgtgctttcctgacactgcgaatacattccttaacccgctgcctcagtggtaataaatggtgctagatattgctactattttatagatttcctggtgcttagccttataaaaaaggttgtaaaatgtacatttatattttatcttttttttttttttttttctgagacgcagtctggctctctgtcgcccaggctggagtgcagtggctcgatctcggctcactgcaagctccgcctcccgggttcacgccattctcctgcctcagcctcccgagtagctgggactacaggcgcccgccaccacgcccggctaattttttgtatttttagtagagacggggtttcaccgtgttagccaggatggtgtcgatctcctgacctcgtgatccacccgcctcggcctcccaaagtgctgggattacaggcttgagccaccgcgcccggctatattttatcttttatctttttctttgacatttaccaatcaccaagcatgcaccaaacactgctttaggcactggggacacaaaggggacagagccatcctcctttgacacctggtcttcagttctgtgcccaacgtatatagttttgacaatgaccaggttggactgtttaatgtctttcaacttaccacgtaatcctcttgtagggatcacatctttctttatgatattgtatttctctacctctaacagtaaaaattccattcaacccttaaagctcacttcaaattcttctttgagaagtttttcctttctccgcaaccagatgtacatatttgaactctctttgtacttggagggcacttctttcgtggtagttcttttatttttattaatctctgtatccttagatagtcctccaacaaccaaaggttgggactctgtcttacatatctgggtgcccctcatagtgcagtaataagtaagttgattatatacgagctatgtaacttatattttttaatggttggatatcactgagtttttttttttaagaatttttttattgaggtaaacttcacataacataaaattaactattttaaagtgagaagttcagtgccacttagtattgttaacaatgttgcataaccaccacctttatttaaagttccaaaaaaaatgttctcctctaaaaggaaaccccatcccattaagcagatactctccattccttccttcctccagcccccagcaaccaccaatctgctttctgtctctatggatttatctattcttgctattttatataaattgaattgtatgagaccttttgtgtctggcttctttcacttagtacaagtttttgagatttatttacatagtagcatgtatcaacacttcatttttatggccaaataaaattgtattatgtgtttatagcacaatttatttatccactcattcattgatggactttgggttgtttctgacttttggctattgggaatagtgctgctatgaatgtttgtgtacctgtatttgtttgaatgcctattttgcattctcttgggtatatatctaggagtggaactgctgggtcatatgttaattctatgtttagctttttgaggaacagacaaactgttttccacagcagttgaaccattccacattcccaccagcaatgtatgagaattccaatttctgtccacttcctcaccaacacttattattttccttttcctttttttaaaaaaaataagttatggccatcttagtgggtgtgaagtggtatctcattgtgttttttatttgcatttcctatgtaatgagctagaaactaaagtacaaactagatgggacatccagtccctttgatagataatgctgagtaaaaaatgagatgaaagacatttgtttgtttttagaacacgagtgacagtttgttaaaaagctttagaggaggaatgaaaacaaagtgaagtacacttagaaaagggccaagtggacatcttggatgtcaagtgcctagttcagtatcttttttttttttttttttttttttgagacagtgcctcactctgtcacccaggctggagtgtagtggcatgatctgggctcactgcaacctcctcctcctggattcaagcaattctcttgcttcagcctcccaagtagctgagactacaagcacccaccatcacacccagctaattttgtatttttcagtagagacggggtttcgccacattggccgtgttggtcttgaactcctggcctcaagcgatccgcctacctcagcctcccaaagtgctaggattacaggcataagccactgagcccagccctagttcagtatcttttatgtaaattacaaacatctgcaacattatgtatcatatgcagatacttattgcatttcttttattagtggtgaaagtgttctatgcatttattggctcttgaatttcctcatctatgaattgtcattcatacacctacttttctgcttcgtttttacatatgtctttgcctattaaagatattatccctctgttttatattttctctcattcttgtattgccttttaaattttgttatgatgtttcattaataaacagtgttttgttttcctctataatcaaaaaaaaaaaaaaaaaaa

SEQ ID NO: 47 - DNA, 5346 bp, Homo sapiens
ggggagcaggcgggggagcgggcgggaagcagtgggagcgcgcgtgcgcgcggccgtgcagcctgggcagtgggtcctgcctgtgacgcgcggcggcggtcggtcctgcctgtaacggcggcggcggctgctgctccagacacctgcggcggcggcggcgaccccgcggcgggcgcggagatgtggcccctggtagcggcgctgttgctgggctcggcgtgctgcggatcagctcagctactatttaataaaacaaaatctgtagaattcacgttttgtaatgacactgtcgtcattccatgctttgttactaatatggaggcacaaaacactactgaagtatacgtaaagtggaaatttaaaggaagagatatttacacctttgatggagctctaaacaagtccactgtccccactgactttagtagtgcaaaaattgaagtctcacaattactaaaaggagatgcctctttgaagatggataagagtgatgctgtctcacacacaggaaactacacttgtgaagtaacagaattaaccagagaaggtgaaacgatcatcgagctaaaatatcgtgttgtttcatggttttctccaaatgaaaatattcttattgttattttcccaatttttgctatactcctgttctggggacagtttggtattaaaacacttaaatatagatccggtggtatggatgagaaaacaattgctttacttgttgctggactagtgatcactgtcattgtcattgttggagccattcttttcgtcccaggtgaatattcattaaagaatgctactggccttggtttaattgtgacttctacagggatattaatattacttcactactatgtgtttagtacagcgattggattaacctccttcgtcattgccatattggttattcaggtgatagcctatatcctcgctgtggttggactgagtctctgtattgcggcgtgtataccaatgcatggccctcttctgatttcaggtttgagtatcttagctctagcacaattacttggactagtttatatgaaatttgtggcttccaatcagaagactatacaacctcctaggaaagctgtagaggaaccccttaatgcattcaaagaatcaaaaggaatgatgaatgatgaataactgaagtgaagtgatggactccgatttggagagtagtaagacgtgaaaggaatacacttgtgtttaagcaccatggccttgatgattcactgttggggagaagaaacaagaaaagtaactggttgtcacctatgagacccttacgtgattgttagttaagtttttattcaaagcagctgtaatttagttaataaaataattatgatctatgttgtttgcccaattgagatccagttttttgttgttatttttaatcaattaggggcaatagtagaatggacaatttccaagaatgatgcctttcaggtcctagggcctctggcctctaggtaaccagtttaaattggttcagggtgataactacttagcactgccctggtgattacccagagatatctatgaaaaccagtggcttccatcaaacctttgccaactcaggttcacagcagctttgggcagttatggcagtatggcattagctgagaggtgtctgccacttctgggtcaatggaataataaattaagtacaggcaggaatttggttgggagcatcttgtatgatctccgtatgatgtgatattgatggagatagtggtcctcattcttgggggttgccattcccacattcccccttcaacaaacagtgtaacaggtccttcccagatttagggtacttttattgatggatatgttttccttttattcacataaccccttgaaaccctgtcttgtcctcctgttacttgcttctgctgtacaagatgtagcaccttttctcctctttgaacatggtctagtgacacggtagcaccagttgcaggaaggagccagacttgttctcagagcactgtgttcacacttttcagcaaaaatagctatggttgtaacatatgtattcccttcctctgatttgaaggcaaaaatctacagtgtttcttcacttcttttctgatctggggcatgaaaaaagcaagattgaaatttgaactatgagtctcctgcatggcaacaaaatgtgtgtcaccatcaggccaacaggccagcccttgaatggggatttattactgttgtatctatgttgcatgataaacattcatcaccttcctcctgtagtcctgcctcgtactccccttcccctatgattgaaaagtaaacaaaacccacatttcctatcctggttagaagaaaattaatgttctgacagttgtgatcgcctggagtacttttagacttttagcattcgttttttacctgtttgtggatgtgtgtttgtatgtgcatacgtatgagataggcacatgcatcttctgtatggacaaaggtggggtacctacaggagagcaaaggttaattttgtgcttttagtaaaaacatttaaatacaaagttctttattgggtggaattatatttgatgcaaatatttgatcacttaaaacttttaaaacttctaggtaatttgccacgctttttgactgctcaccaataccctgtaaaaatacgtaattcttcctgtttgtgtaataagatattcatatttgtagttgcattaataatagttatttcttagtccatcagatgttcccgtgtgcctcttttatgccaaattgattgtcatatttcatgttgggaccaagtagtttgcccatggcaaacctaaatttatgacctgctgaggcctctcagaaaactgagcatactagcaagacagctcttcttgaaaaaaaaaatatgtatacacaaatatatacgtatatctatatatacgtatgtatatacacacatgtatattcttccttgattgtgtagctgtccaaaataataacatatatagagggagctgtattcctttatacaaatctgatggctcctgcagcactttttccttctgaaaatatttacattttgctaacctagtttgttactttaaaaatcagttttgatgaaaggagggaaaagcagatggacttgaaaaagatccaagctcctattagaaaaggtatgaaaatctttatagtaaaattttttataaactaaagttgtaccttttaatatgtagtaaactctcatttatttggggttcgctcttggatctcatccatccattgtgttctctttaatgctgcctgccttttgaggcattcactgccctagacaatgccaccagagatagtgggggaaatgccagatgaaaccaactcttgctctcactagttgtcagcttctctggataagtgaccacagaagcaggagtcctcctgcttgggcatcattgggccagttccttctctttaaatcagatttgtaatggctcccaaattccatcacatcacatttaaattgcagacagtgttttgcacatcatgtatctgttttgtcccataatatgctttttactccctgatcccagtttctgctgttgactcttccattcagttttatttattgtgtgttctcacagtgacaccatttgtccttttctgcaacaacctttccagctacttttgccaaattctatttgtcttctccttcaaaacattctcctttgcagttcctcttcatctgtgtagctgctcttttgtctcttaacttaccattcctatagtactttatgcatctctgcttagttctattagttttttggccttgctcttctccttgattttaaaattccttctatagctagagcttttctttctttcattctctcttcctgcagtgttttgcatacatcagaagctaggtacataagttaaatgattgagagttggctgtatttagatttatcactttttaatagggtgagcttgagagttttctttctttctgttttttttttttgttttttttttttttttttttttttttttttttgactaatttcacatgctctaaaaaccttcaaaggtgattatttttctcctggaaactccaggtccattctgtttaaatccctaagaatgtcagaattaaaataacagggctatcccgtaattggaaatatttcttttttcaggatgctatagtcaatttagtaagtgaccaccaaattgttatttgcactaacaaagctcaaaacacgataagtttactcctccatctcagtaataaaaattaagctgtaatcaaccttctaggtttctcttgtcttaaaatgggtattcaaaaatggggatctgtggtgtatgtatggaaacacatactccttaatttacctgttgttggaaactggagaaatgattgtcgggcaaccgtttattttttattgtattttatttggttgagggatttttttataaacagttttacttgtgtcatattttaaaattactaactgccatcacctgctggggtcctttgttaggtcattttcagtgactaatagggataatccaggtaactttgaagagatgagcagtgagtgaccaggcagtttttctgcctttagctttgacagttcttaattaagatcattgaagaccagctttctcataaatttctctttttgaaaaaaagaaagcatttgtactaagctcctctgtaagacaacatcttaaatcttaaaagtgttgttatcatgactggtgagagaagaaaacattttgtttttattaaatggagcattatttacaaaaagccattgttgagaattagatcccacatcgtataaatatctattaaccattctaaataaagagaactccagtgttgctatgtgcaagatcctctcttggagcttttttgcatagcaattaaaggtgtgctatttgtcagtagccatttttttgcagtgatttgaagaccaaagttgttttacagctgtgttaccgttaaaggtttttttttttatatgtattaaatcaatttatcactgtttaaagctttgaatatctgcaatctttgccaaggtacttttttatttaaaaaaaaacataactttgtaaatattaccctgtaatattatatatacttaataaaacattttaagctattttgttgggctatttctattgctgctacagcagaccacaagcacatttctgaaaaatttaatttattaatgtatttttaagttgcttatattctaggtaacaatgtaaagaatgatttaaaatattaattatgaattttttgagtataatacccaataagcttttaattagagcagagttttaattaaaagttttaaatcagtc

SEQ ID NO: 48 - DNA, 1835 bp, Homo sapiens
tccccattgaataacagccaagttgctttggtttctatttctttgttaagtcgttccctctacaaaggacttcctagtgggtgtgaaaggcagcggtggccacagaggcggcggagagatggccttcagcggttcccaggctccctacctgagtccagctgtccccttttctgggactattcaaggaggtctccaggacggacttcagatcactgtcaatgggaccgttctcagctccagtggaaccaggtttgctgtgaactttcagactggcttcagtggaaatgacattgccttccacttcaaccctcggtttgaagatggagggtacgtggtgtgcaacacgaggcagaacggaagctgggggcccgaggagaggaagacacacatgcctttccagaaggggatgccctttgacctctgcttcctggtgcagagctcagatttcaaggtgatggtgaacgggatcctcttcgtgcagtacttccaccgcgtgcccttccaccgtgtggacaccatctccgtcaatggctctgtgcagctgtcctacatcagcttccagaacccccgcacagtccctgttcagcctgccttctccacggtgccgttctcccagcctgtctgtttcccacccaggcccagggggcgcagacaaaaacctcccggcgtgtggcctgccaacccggctcccattacccagacagtcatccacacagtgcagagcgcccctggacagatgttctctactcccgccatcccacctatgatgtacccccaccccgcctatccgatgcctttcatcaccaccattctgggagggctgtacccatccaagtccatcctcctgtcaggcactgtcctgcccagtgctcagaggttccacatcaacctgtgctctgggaaccacatcgccttccacctgaacccccgttttgatgagaatgctgtggtccgcaacacccagatcgacaactcctgggggtctgaggagcgaagtctgccccgaaaaatgcccttcgtccgtggccagagcttctcagtgtggatcttgtgtgaagctcactgcctcaaggtggccgtggatggtcagcacctgtttgaatactaccatcgcctgaggaacctgcccaccatcaacagactggaagtggggggcgacatccagctgacccatgtgcagacataggcggcttcctggccctggggccgggggctggggtgtggggcagtctgggtcctctcatcatccccacttcccaggcccagcctttccaaccctgcctgggatctgggctttaatgcagaggccatgtccttgtctggtcctgcttctggctacagccaccctggaacggagaaggcagctgacggggattgccttcctcagccgcagcagcacctggggctccagctgctggaatcctaccatcccaggaggcaggcacagccagggagaggggaggagtgggcagtgaagatgaagccccatgctcagtcccctcccatcccccacgcagctccaccccagtcccaagccaccagctgtctgctcctggtgggaggtggcctcctcagcccctcctctctgacctttaacctcactctcaccttgcaccgtgcaccaacccttcacccctcctggaaagcaggcctgatggcttcccactggcctccaccacctgaccagagtgttctcttcagaggactggctcctttcccagtgtccttaaaataaagaaatgaaaatgcttgttggcacattcaaaaaaaaaaaaaaaaaaaaaaaaaaaaaaaaaaaaaaaaaaaaaaaaaaaaaaaaaaaaaaaaaaaaaaaa

SEQ ID NO: 49 - protein, 363 aa, Sus scrofa
MMAFCALRKALPCRPENPFSSRCFVEILWVSLALVFLLPMPSDACDEPPKFESMRPQFLNTTYRPGDRVEYECRPGFQPMVPALPTFSVCQDDNTWSPLQEACRRKACSNLPDPLNGQVSYPNGDMLFGSKAQFTCNTGFYIIGAETVYCQVSGNVMAWSEPSPLCEKILCKPPGEIPNGKYTNSHKDVFEYNEVVTYSCLSSTGPDEFSLVGESSLFCIGKDEWSSDPPECKVVKCPYPVVPNGEIVSGFGSKFYYKAEVVFKCNAGFTLHGRDTIVCGANSTWEPEMPQCIKDSKPTDPPATPGPSHPGPPSPSDASPPKDAESLDGGIIAAIVVGVLAAIAVIAGGVYFFHHKYNKKRSK

SEQ ID NO: 50 - protein, 341 aa, Sus scrofa
MSPLPRSAPAVRRLMGGQTPPPLLLLLLLLCIPAAQGDCSLPPDVPNAQPDLRGLASFPEQTTITYKCNKGFVKVPGMADSVLCLNDKWSEVAEFCNRSCDVPTRLHFASLKKSYSKQNYFPEGFTVEYECRKGYKRDLTLSEKLTCLQNFTWSKPDEFCKKKQCPTPGELKNGHVNITTDLLFGASIFFSCNAGYRLVGATSSYCFAIANDVEWSDPLPECQEISPTVKAIPAVEKPITVNFPATKYPAIPRATTSFHSSTSKNRGNPSSGMRIMSSGTMLLIAGGVAVIIIIVALILAKGFWHYGKSGSYHTHENNKAVNVAFYNLPATGDAADVRPGN

SEQ ID NO: 51 - protein, 123 aa, Sus scrofa
MGSKGGFILLWLLSILAVLCHLGHSLQCYNCINPAGSCTTAMNCSHNQDACIFVEAVPPKTYYQCWRFDECNFDFISRNLAEKKLKYNCCRKDLCNKSDATISSGKTALLVILLLVATWHFCL

SEQ ID NO: 52 - protein, 86 aa, Sus scrofa
MSWALKTTDMFLDSSRCTHRTYGDVCAEIHKREREDREAARTAVTDPELPLLCPPDVRSDPASRNPTQQTRGCARSNERQDRVLAP

SEQ ID NO: 53 - protein, 338 aa, Homo sapiens
MVVMAPRTLFLLLSGALTLTETWAGSHSMRYFSAAVSRPGRGEPRFIAMGYVDDTQFVRFDSDSACPRMEPRAPWVEQEGPEYWEEETRNTKAHAQTDRMNLQTLRGYYNQSEASSHTLQWMIGCDLGSDGRLLRGYEQYAYDGKDYLALNEDLRSWTAADTAAQISKRKCEAANVAEQRRAYLEGTCVEWLHRYLENGKEMLQRADPPKTHVTHHPVFDYEATLRCWALGFYPAEIILTWQRDGEDQTQDVELVETRPAGDGTFQKWAAVVVPSGEEQRYTCHVQHEGLPEPLMLRWKQSSLPTIPIMGIVAGLVVLAAVVTGAAVAAVLWRKKSSD

SEQ ID NO: 54 - protein, 358 aa, Homo sapiens
MVDGTLLLLLSEALALTQTWAGSHSLKYFHTSVSRPGRGEPRFISVGYVDDTQFVRFDNDAASPRMVPRAPWMEQEGSEYWDRETRSARDTAQIFRVNLRTLRGYYNQSEAGSHTLQWMHGCELGPDGRFLRGYEQFAYDGKDYLTLNEDLRSWTAVDTAAQISEQKSNDASEAEHQRAYLEDTCVEWLHKYLEKGKETLLHLEPPKTHVTHHPISDHEATLRCWALGFYPAEITLTWQQDGEGHTQDTELVETRPAGDGTFQKWAAVVVPSGEEQRYTCHVQHEGLPEPVTLRWKPASQPTIPIVGIIAGLVLLGSVVSGAVVAAVIWRKKSSGGKGGSYSKAEWSDSAQGSESHSL

SEQ ID NO: 55 - protein, 119 aa, Homo sapiens
MSRSVALAVLALLSLSGLEAIQRTPKIQVYSRHPAENGKSNFLNCYVSGFHPSDIEVDLLKNGERIEKVEHSDLSFSKDWSFYLLYYTEFTPTEKDEYACRVNHVTLSQPKIVKWDRDM

SEQ ID NO: 56 - protein, 176 aa, Homo sapiens
MRIFAVFIFMTYWHLLNAPYNKINQRILVVDPVTSEHELTCQAEGYPKAEVIWTSSDHQVLSGKTTTTNSKREEKLFNVTSTLRINTTTNEIFYCTFRRLDPEENHTAELVIPELPLAHPPNERTHLVILGAILLCLGVALTFIFRLRKGRMMDVKKCGIQDTNSKKQSDTHLEET

SEQ ID NO: 57 - protein, 273 aa, Homo sapiens
MIFLLLMLSLELQLHQIAALFTVTVPKELYIIEHGSNVTLECNFDTGSHVNLGAITASLQKVENDTSPHRERATLLEEQLPLGKASFHIPQVQVRDEGQYQCIIIYGVAWDYKYLTLKVKASYRKINTHILKVPETDEVELTCQATGYPLAEVSWPNVSVPANTSHSRTPEGLYQVTSVLRLKPPPGRNFSCVFWNTHVRELTLASIDLQSQMEPRTHPTWLLHIFIPFCIIAFIFIATVIALRKQLCQKLYSSKDTTKRPVTTTKREVNSAI

SEQ ID NO: 58 - protein, 376 aa, Homo sapiens
METLSNASGTFAIRLLKILCQDNPSHNVFCSPVSISSALAMVLLGAKGNTATQMAQALSLNTEEDIHRAFQSLLTEVNKAGTQYLLRTANRLFGEKTCQFLSTFKESCLQFYHAELKELSFIRAAEESRKHINTWVSKKTEGKIEELLPGSSIDAETRLVLVNAIYFKGKWNEPFDETYTREMPFKINQEEQRPVQMMYQEATFKLAHVGEVRAQLLELPYARKELSLLVLLPDDGVELSTVEKSLTFEKLTAWTKPDCMKSTEVEVLLPKFKLQEDYDMESVLRHLGIVDAFQQGKADLSAMSAERDLCLSKFVHKSFVEVNEEGTEAAAASSCFVVAECCMESGPRFCADHPFLFFIRHNRANSILFCGRFSSP

SEQ ID NO: 59 - protein, 323 aa, Homo sapiens
MWPLVAALLLGSACCGSAQLLFNKTKSVEFTFCNDTVVIPCFVTNMEAQNTTEVYVKWKFKGRDIYTFDGALNKSTVPTDFSSAKIEVSQLLKGDASLKMDKSDAVSHTGNYTCEVTELTREGETIIELKYRVVSWFSPNENILIVIFPIFAILLFWGQFGIKTLKYRSGGMDEKTIALLVAGLVITVIVIVGAILFVPGEYSLKNATGLGLIVTSTGILILLHYYVFSTAIGLTSFVIAILVIQVIAYILAVVGLSLCIAACIPMHGPLLISGLSILALAQLLGLVYMKFVASNQKTIQPPRKAVEEPLNAFKESKGMMNDE

SEQ ID NO: 60 - protein, 355 aa, Homo sapiens
MAFSGSQAPYLSPAVPFSGTIQGGLQDGLQITVNGTVLSSSGTRFAVNFQTGFSGNDIAFHFNPRFEDGGYVVCNTRQNGSWGPEERKTHMPFQKGMPFDLCFLVQSSDFKVMVNGILFVQYFHRVPFHRVDTISVNGSVQLSYISFQNPRTVPVQPAFSTVPFSQPVCFPPRPRGRRQKPPGVWPANPAPITQTVIHTVQSAPGQMFSTPAIPPMMYPHPAYPMPFITTILGGLYPSKSILLSGTVLPSAQRFHINLCSGNHIAFHLNPRFDENAVVRNTQIDNSWGSEERSLPRKMPFVRGQSFSVWILCEAHCLKVAVDGQHLFEYYHRLRNLPTINRLEVGGDIQLTHVQT

SEQ ID NO: 61 - DNA, 20 bp, Artificial Sequence
  Description of Artificial Sequence: Synthetic oligonucleotide
ggggaggaagaacttcacct

SEQ ID NO: 62 - DNA, 20 bp, Artificial Sequence
  Description of Artificial Sequence: Synthetic oligonucleotide
gtaggacgaccctctgtgtg

SEQ ID NO: 63 - DNA, 20 bp, Artificial Sequence
  Description of Artificial Sequence: Synthetic oligonucleotide
gaccctctgtgtggggtctg

SEQ ID NO: 64 - DNA, 20 bp, Artificial Sequence
  Description of Artificial Sequence: Synthetic oligonucleotide
ggctcggttccattgcaaga

SEQ ID NO: 65 - DNA, 20 bp, Artificial Sequence
  Description of Artificial Sequence: Synthetic oligonucleotide
gctcggttccattgcaagat

SEQ ID NO: 66 - DNA, 20 bp, Artificial Sequence
  Description of Artificial Sequence: Synthetic oligonucleotide
ggttccattgcaagatgggc

SEQ ID NO: 67 - DNA, 20 bp, Artificial Sequence
  Description of Artificial Sequence: Synthetic oligonucleotide
gtcccctcctgagtgtcgaa

SEQ ID NO: 68 - DNA, 20 bp, Artificial Sequence
  Description of Artificial Sequence: Synthetic oligonucleotide
gcctcaggtacagatcaaaa

SEQ ID NO: 69 - DNA, 20 bp, Artificial Sequence
  Description of Artificial Sequence: Synthetic oligonucleotide
ggacctgggtgccaggaacg

SEQ ID NO: 70 - DNA, 20 bp, Artificial Sequence
  Description of Artificial Sequence: Synthetic oligonucleotide
gtacccagagtcagatcacc

SEQ ID NO: 71 - DNA, 20 bp, Artificial Sequence
  Description of Artificial Sequence: Synthetic oligonucleotide
gtacccagagtcagatcacc

SEQ ID NO: 72 - DNA, 20 bp, Artificial Sequence
  Description of Artificial Sequence: Synthetic oligonucleotide
gtgcccttcgacactcagga

SEQ ID NO: 73 - DNA, 20 bp, Artificial Sequence
  Description of Artificial Sequence: Synthetic oligonucleotide
gtgcccttcgacactcagga

SEQ ID NO: 74 - DNA, 20 bp, Artificial Sequence
  Description of Artificial Sequence: Synthetic oligonucleotide
gtgcccttcgacactcagga

SEQ ID NO: 75 - DNA, 20 bp, Artificial Sequence
  Description of Artificial Sequence: Synthetic oligonucleotide
gggggccccaaggcagaaga

SEQ ID NO: 76 - DNA, 20 bp, Artificial Sequence
  Description of Artificial Sequence: Synthetic oligonucleotide
ggcagtcttccagtacctgg

SEQ ID NO: 77 - DNA, 26 bp, Artificial Sequence
  Description of Artificial Sequence: Synthetic oligonucleotide
acaccggggaggaagaacttcacctg

SEQ ID NO: 78 - DNA, 26 bp, Artificial Sequence
  Description of Artificial Sequence: Synthetic oligonucleotide
aaaacaggtgaagttcttcctccccg

SEQ ID NO: 79 - DNA, 26 bp, Artificial Sequence
  Description of Artificial Sequence: Synthetic oligonucleotide
acaccgtaggacgaccctctgtgtgg

SEQ ID NO: 80 - DNA, 26 bp, Artificial Sequence
  Description of Artificial Sequence: Synthetic oligonucleotide
aaaaccacacagagggtcgtcctacg

SEQ ID NO: 81 - DNA, 26 bp, Artificial Sequence
  Description of Artificial Sequence: Synthetic oligonucleotide
acaccgaccctctgtgtggggtctgg

SEQ ID NO: 82 - DNA, 26 bp, Artificial Sequence
  Description of Artificial Sequence: Synthetic oligonucleotide
aaaaccagaccccacacagagggtcg

SEQ ID NO: 83 - DNA, 26 bp, Artificial Sequence
  Description of Artificial Sequence: Synthetic oligonucleotide
acaccggctcggttccattgcaagag

SEQ ID NO: 84 - DNA, 26 bp, Artificial Sequence
  Description of Artificial Sequence: Synthetic oligonucleotide
aaaactcttgcaatggaaccgagccg

SEQ ID NO: 85 - DNA, 26 bp, Artificial Sequence
  Description of Artificial Sequence: Synthetic oligonucleotide
acaccgctcggttccattgcaagatg

SEQ ID NO: 86 - DNA, 26 bp, Artificial Sequence
  Description of Artificial Sequence: Synthetic oligonucleotide
aaaacatcttgcaatggaaccgagcg

SEQ ID NO: 87 - DNA, 26 bp, Artificial Sequence
  Description of Artificial Sequence: Synthetic oligonucleotide
acaccggttccattgcaagatgggcg

SEQ ID NO: 88 - DNA, 26 bp, Artificial Sequence
  Description of Artificial Sequence: Synthetic oligonucleotide
aaaacgcccatcttgcaatggaaccg

SEQ ID NO: 89 - DNA, 26 bp, Artificial Sequence
  Description of Artificial Sequence: Synthetic oligonucleotide
acaccgtcccctcctgagtgtcgaag

SEQ ID NO: 90 - DNA, 26 bp, Artificial Sequence
  Description of Artificial Sequence: Synthetic oligonucleotide
aaaacttcgacactcaggaggggacg

SEQ ID NO: 91 - DNA, 26 bp, Artificial Sequence
  Description of Artificial Sequence: Synthetic oligonucleotide
acaccgcctcaggtacagatcaaaag

SEQ ID NO: 92 - DNA, 26 bp, Artificial Sequence
  Description of Artificial Sequence: Synthetic oligonucleotide
aaaacttttgatctgtacctgaggcg

SEQ ID NO: 93 - DNA, 26 bp, Artificial Sequence
  Description of Artificial Sequence: Synthetic oligonucleotide
acaccggacctgggtgccaggaacgg

SEQ ID NO: 94 - DNA, 26 bp, Artificial Sequence
  Description of Artificial Sequence: Synthetic oligonucleotide
aaaaccgttcctggcacccaggtccg

SEQ ID NO: 95 - DNA, 26 bp, Artificial Sequence
  Description of Artificial Sequence: Synthetic oligonucleotide
acaccgtacccagagtcagatcaccg

SEQ ID NO: 96 - DNA, 26 bp, Artificial Sequence
  Description of Artificial Sequence: Synthetic oligonucleotide
aaaacggtgatctgactctgggtacg

SEQ ID NO: 97 - DNA, 26 bp, Artificial Sequence
  Description of Artificial Sequence: Synthetic oligonucleotide
acaccgtacccagagtcagatcaccg

SEQ ID NO: 98 - DNA, 26 bp, Artificial Sequence
  Description of Artificial Sequence: Synthetic oligonucleotide
aaaacggtgatctgactctgggtacg

SEQ ID NO: 99 - DNA, 26 bp, Artificial Sequence
  Description of Artificial Sequence: Synthetic oligonucleotide
acaccgtgcccttcgacactcaggag

SEQ ID NO: 100 - DNA, 26 bp, Artificial Sequence
  Description of Artificial Sequence: Synthetic oligonucleotide
aaaactcctgagtgtcgaagggcacg

SEQ ID NO: 101 - DNA, 26 bp, Artificial Sequence
  Description of Artificial Sequence: Synthetic oligonucleotide
acaccgtgcccttcgacactcaggag

SEQ ID NO: 102 - DNA, 26 bp, Artificial Sequence
  Description of Artificial Sequence: Synthetic oligonucleotide
aaaactcctgagtgtcgaagggcacg

SEQ ID NO: 103 - DNA, 26 bp, Artificial Sequence
  Description of Artificial Sequence: Synthetic oligonucleotide
acaccgtgcccttcgacactcaggag

SEQ ID NO: 104 - DNA, 26 bp, Artificial Sequence
  Description of Artificial Sequence: Synthetic oligonucleotide
aaaactcctgagtgtcgaagggcacg

SEQ ID NO: 105 - DNA, 26 bp, Artificial Sequence
  Description of Artificial Sequence: Synthetic oligonucleotide
acaccgggggccccaaggcagaagag

SEQ ID NO: 106 - DNA, 26 bp, Artificial Sequence
  Description of Artificial Sequence: Synthetic oligonucleotide
aaaactcttctgccttggggcccccg

SEQ ID NO: 107 - DNA, 26 bp, Artificial Sequence
  Description of Artificial Sequence: Synthetic oligonucleotide
acaccggcagtcttccagtacctggg

SEQ ID NO: 108 - DNA, 26 bp, Artificial Sequence
  Description of Artificial Sequence: Synthetic oligonucleotide
aaaacccaggtactggaagactgccg

SEQ ID NO: 109 - DNA, 24 bp, Artificial Sequence
  Description of Artificial Sequence: Synthetic oligonucleotide
caccgagaaaataatgaatgtcaa

SEQ ID NO: 110 - DNA, 24 bp, Artificial Sequence
  Description of Artificial Sequence: Synthetic oligonucleotide
aaacttgacattcattattttctc

SEQ ID NO: 111 - DNA, 24 bp, Artificial Sequence
  Description of Artificial Sequence: Synthetic oligonucleotide
caccgagtaaggtacgtgatctgt

SEQ ID NO: 112 - DNA, 24 bp, Artificial Sequence
  Description of Artificial Sequence: Synthetic oligonucleotide
aaacacagatcacgtaccttactc

SEQ ID NO: 113 - DNA, 26 bp, Artificial Sequence
  Description of Artificial Sequence: Synthetic oligonucleotide
acaccgcaaggggatattcgggtttg

SEQ ID NO: 114 - DNA, 26 bp, Artificial Sequence
  Description of Artificial Sequence: Synthetic oligonucleotide
aaaacaaacccgaatatccccttgcg

SEQ ID NO: 115 - DNA, 26 bp, Artificial Sequence
  Description of Artificial Sequence: Synthetic oligonucleotide
acaccggcgctctttgggaacgtccg

SEQ ID NO: 116 - DNA, 26 bp, Artificial Sequence
  Description of Artificial Sequence: Synthetic oligonucleotide
aaaacggacgttcccaaagagcgccg

SEQ ID NO: 117 - DNA, 26 bp, Artificial Sequence
  Description of Artificial Sequence: Synthetic oligonucleotide
acaccgacgacaatggtctggcccag

SEQ ID NO: 118 - DNA, 26 bp, Artificial Sequence
  Description of Artificial Sequence: Synthetic oligonucleotide
aaaactgggccagaccattgtcgtcg

SEQ ID NO: 119 - DNA, 26 bp, Artificial Sequence
  Description of Artificial Sequence: Synthetic oligonucleotide
acaccgtgcttttggtcctgagcgtg

SEQ ID NO: 120 - DNA, 26 bp, Artificial Sequence
  Description of Artificial Sequence: Synthetic oligonucleotide
aaaacacgctcaggaccaaaagcacg

SEQ ID NO: 121 - DNA, 26 bp, Artificial Sequence
  Description of Artificial Sequence: Synthetic oligonucleotide
acaccgtcgatcctcaagatattgag

SEQ ID NO: 122 - DNA, 26 bp, Artificial Sequence
  Description of Artificial Sequence: Synthetic oligonucleotide
aaaactcaatatcttgaggatcgacg

SEQ ID NO: 123 - DNA, 26 bp, Artificial Sequence
  Description of Artificial Sequence: Synthetic oligonucleotide
acaccggggagagaagcagaggatgg

SEQ ID NO: 124 - DNA, 26 bp, Artificial Sequence
  Description of Artificial Sequence: Synthetic oligonucleotide
aaaaccatcctctgcttctctccccg

SEQ ID NO: 125 - DNA, 26 bp, Artificial Sequence
  Description of Artificial Sequence: Synthetic oligonucleotide
acaccgctgcttgtctcaactgtaag

SEQ ID NO: 126 - DNA, 26 bp, Artificial Sequence
  Description of Artificial Sequence: Synthetic oligonucleotide
aaaacttacagttgagacaagcagcg

SEQ ID NO: 127 - DNA, 26 bp, Artificial Sequence
  Description of Artificial Sequence: Synthetic oligonucleotide
acaccgaatacatcaacagcccagag

SEQ ID NO: 128 - DNA, 26 bp, Artificial Sequence
  Description of Artificial Sequence: Synthetic oligonucleotide
aaaactctgggctgttgatgtattcg

SEQ ID NO: 129 - DNA, 26 bp, Artificial Sequence
  Description of Artificial Sequence: Synthetic oligonucleotide
acaccgcccagaaggttctttgttcg

SEQ ID NO: 130 - DNA, 26 bp, Artificial Sequence
  Description of Artificial Sequence: Synthetic oligonucleotide
aaaacgaacaaagaaccttctgggcg

SEQ ID NO: 131 - DNA, 26 bp, Artificial Sequence
  Description of Artificial Sequence: Synthetic oligonucleotide
acaccgttggcagcagtgctcagagg

SEQ ID NO: 132 - DNA, 26 bp, Artificial Sequence
  Description of Artificial Sequence: Synthetic oligonucleotide
aaaacctctgagcactgctgccaacg

SEQ ID NO: 133 - DNA, 26 bp, Artificial Sequence
  Description of Artificial Sequence: Synthetic oligonucleotide
acaccgggggccgggagccgaggtgg

SEQ ID NO: 134 - DNA, 26 bp, Artificial Sequence
  Description of Artificial Sequence: Synthetic oligonucleotide
aaaaccacctcggctcccggcccccg

SEQ ID NO: 135 - DNA, 26 bp, Artificial Sequence
  Description of Artificial Sequence: Synthetic oligonucleotide
acaccgcacccagcttctgccgatcg

SEQ ID NO: 136 - DNA, 26 bp, Artificial Sequence
  Description of Artificial Sequence: Synthetic oligonucleotide
aaaacgatcggcagaagctgggtgcg

SEQ ID NO: 137 - DNA, 26 bp, Artificial Sequence
  Description of Artificial Sequence: Synthetic oligonucleotide
acaccgagagggggctgatcactgtg

SEQ ID NO: 138 - DNA, 26 bp, Artificial Sequence
  Description of Artificial Sequence: Synthetic oligonucleotide
aaaacacagtgatcagccccctctcg

SEQ ID NO: 139 - DNA, 26 bp, Artificial Sequence
  Description of Artificial Sequence: Synthetic oligonucleotide
acaccgtagaaaaggatgaagaaaag

SEQ ID NO: 140 - DNA, 26 bp, Artificial Sequence
  Description of Artificial Sequence: Synthetic oligonucleotide
aaaacttttcttcatccttttctacg

SEQ ID NO: 141 - DNA, 26 bp, Artificial Sequence
  Description of Artificial Sequence: Synthetic oligonucleotide
acaccgccaaatcttcaggagatctg

SEQ ID NO: 142 - DNA, 26 bp, Artificial Sequence
  Description of Artificial Sequence: Synthetic oligonucleotide
aaaacagatctcctgaagatttggcg

SEQ ID NO: 143 - DNA, 26 bp, Artificial Sequence
  Description of Artificial Sequence: Synthetic oligonucleotide
acaccgatctgggttctgaatcccag

SEQ ID NO: 144 - DNA, 26 bp, Artificial Sequence
  Description of Artificial Sequence: Synthetic oligonucleotide
aaaactgggattcagaacccagatcg

SEQ ID NO: 145 - DNA, 26 bp, Artificial Sequence
  Description of Artificial Sequence: Synthetic oligonucleotide
acaccggttctgaatcccacgggttg

SEQ ID NO: 146 - DNA, 26 bp, Artificial Sequence
  Description of Artificial Sequence: Synthetic oligonucleotide
aaaacaacccgtgggattcagaaccg

SEQ ID NO: 147 - DNA, 26 bp, Artificial Sequence
  Description of Artificial Sequence: Synthetic oligonucleotide
acaccggcctcagaccccacacagag

SEQ ID NO: 148 - DNA, 26 bp, Artificial Sequence
  Description of Artificial Sequence: Synthetic oligonucleotide
aaaactctgtgtggggtctgaggccg

SEQ ID NO: 149 - DNA, 26 bp, Artificial Sequence
  Description of Artificial Sequence: Synthetic oligonucleotide
acaccgtactgctgctgagcacctgg

SEQ ID NO: 150 - DNA, 26 bp, Artificial Sequence
  Description of Artificial Sequence: Synthetic oligonucleotide
aaaaccaggtgctcagcagcagtacg

SEQ ID NO: 151 - DNA, 26 bp, Artificial Sequence
  Description of Artificial Sequence: Synthetic oligonucleotide
acaccgactgttgcagggggccccag

SEQ ID NO: 152 - DNA, 26 bp, Artificial Sequence
  Description of Artificial Sequence: Synthetic oligonucleotide
aaaactggggccccctgcaacagtcg

SEQ ID NO: 153 - DNA, 22 bp, Artificial Sequence
  Description of Artificial Sequence: Synthetic primer
gagcagagctcactagaacttg

SEQ ID NO: 154 - DNA, 23 bp, Artificial Sequence
  Description of Artificial Sequence: Synthetic primer
aagagacaagcctcagactaaac

SEQ ID NO: 155 - DNA, 20 bp, Artificial Sequence
  Description of Artificial Sequence: Synthetic primer
ctgctctgcaaacactcaga

SEQ ID NO: 156 - DNA, 17 bp, Artificial Sequence
  Description of Artificial Sequence: Synthetic primer
gtggtcttgcccatgcc

SEQ ID NO: 157 - DNA, 36 bp, Artificial Sequence
  Description of Artificial Sequence: Synthetic primer
gcagccatctgagataggaaccctgaaaacgagagg

SEQ ID NO: 158 - DNA, 24 bp, Artificial Sequence
  Description of Artificial Sequence: Synthetic primer
acagcctcttctctaggcggcccc

SEQ ID NO: 159 - DNA, 20 bp, Artificial Sequence
  Description of Artificial Sequence: Synthetic oligonucleotide
gagaaaataatgaatgtcaa

SEQ ID NO: 160 - DNA, 20 bp, Artificial Sequence
  Description of Artificial Sequence: Synthetic oligonucleotide
ttgacattcattattttctc

SEQ ID NO: 161 - DNA, 22 bp, Artificial Sequence
  Description of Artificial Sequence: Synthetic primer
gccttttgctggccttttgctc

SEQ ID NO: 162 - DNA, 28 bp, Artificial Sequence
  Description of Artificial Sequence: Synthetic primer
cgggccatttaccgtaagttatgtaacg

SEQ ID NO: 163 - DNA, 20 bp, Artificial Sequence
  Description of Artificial Sequence: Synthetic primer
tctgattggctgctgaagtc

SEQ ID NO: 164 - DNA, 22 bp, Artificial Sequence
  Description of Artificial Sequence: Synthetic primer
gtagccagcaagtcatgaaatc

SEQ ID NO: 165 - DNA, 20 bp, Artificial Sequence
  Description of Artificial Sequence: Synthetic primer
gggagtattgctgaacctca

SEQ ID NO: 166 - DNA, 21 bp, Artificial Sequence
  Description of Artificial Sequence: Synthetic primer
tcttgactaccactgcgattg

SEQ ID NO: 167 - DNA, 22 bp, Artificial Sequence
  Description of Artificial Sequence: Synthetic primer
gttaggagccagtaatggagtt

SEQ ID NO: 168 - DNA, 22 bp, Artificial Sequence
  Description of Artificial Sequence: Synthetic primer
agtgtctctgtctccagtatct

SEQ ID NO: 169 - DNA, 25 bp, Artificial Sequence
  Description of Artificial Sequence: Synthetic primer
ttggtaaatagcaatcaactcagtg

SEQ ID NO: 170 - DNA, 21 bp, Artificial Sequence
  Description of Artificial Sequence: Synthetic primer
tttctgctcaagtcacactga

SEQ ID NO: 171 - DNA, 23 bp, Artificial Sequence
  Description of Artificial Sequence: Synthetic primer
caagcaatgacaacaacctgata

SEQ ID NO: 172 - DNA, 22 bp, Artificial Sequence
  Description of Artificial Sequence: Synthetic primer
ttgctttctcctgatcccatag

SEQ ID NO: 173 - DNA, 23 bp, Artificial Sequence
  Description of Artificial Sequence: Synthetic primer
cagtgctaatctagagcactacc

SEQ ID NO: 174 - DNA, 23 bp, Artificial Sequence
  Description of Artificial Sequence: Synthetic primer
cattctcctgaagagctcagaat

SEQ ID NO: 175 - DNA, 23 bp, Artificial Sequence
  Description of Artificial Sequence: Synthetic primer
tccattgggctttgtctatactt

SEQ ID NO: 176 - DNA, 24 bp, Artificial Sequence
  Description of Artificial Sequence: Synthetic primer
gacaaaggaaattagcagagaacc

SEQ ID NO: 177 - DNA, 23 bp, Artificial Sequence
  Description of Artificial Sequence: Synthetic primer
aactggtctttcccttggatatt

SEQ ID NO: 178 - DNA, 20 bp, Artificial Sequence
  Description of Artificial Sequence: Synthetic primer
ctggctgcagcatcaatatc

SEQ ID NO: 179 - DNA, 22 bp, Artificial Sequence
  Description of Artificial Sequence: Synthetic primer
gcctctattaattgcctttccc

SEQ ID NO: 180 - DNA, 19 bp, Artificial Sequence
  Description of Artificial Sequence: Synthetic primer
ccattcacttcgcatccct

SEQ ID NO: 181 - DNA, 18 bp, Artificial Sequence
  Description of Artificial Sequence: Synthetic primer
cgggaagtcgggagcata

SEQ ID NO: 182 - DNA, 18 bp, Artificial Sequence
  Description of Artificial Sequence: Synthetic primer
gaggagaagcggccaatc

SEQ ID NO: 183 - DNA, 23 bp, Artificial Sequence
  Description of Artificial Sequence: Synthetic primer
ctgctcttctcttgtcactgatt

SEQ ID NO: 184 - DNA, 17 bp, Artificial Sequence
  Description of Artificial Sequence: Synthetic primer
gcgggagccactttcac

SEQ ID NO: 185 - DNA, 20 bp, Artificial Sequence
  Description of Artificial Sequence: Synthetic primer
tctgattggctgctgaagtc

SEQ ID NO: 186 - DNA, 20 bp, Artificial Sequence
  Description of Artificial Sequence: Synthetic primer
cgagagcaggtagagctagt

SEQ ID NO: 187 - DNA, 20 bp, Artificial Sequence
  Description of Artificial Sequence: Synthetic primer
ggagtgccgcaataccttta

SEQ ID NO: 188 - DNA, 21 bp, Artificial Sequence
  Description of Artificial Sequence: Synthetic primer
cctggactcatttcccatctc

SEQ ID NO: 189 - DNA, 20 bp, Artificial Sequence
  Description of Artificial Sequence: Synthetic primer
gggtggagatgggaaatgag

SEQ ID NO: 190 - DNA, 22 bp, Artificial Sequence
  Description of Artificial Sequence: Synthetic primer
gctacaccaccaaagtatagca

SEQ ID NO: 191 - DNA, 23 bp, Artificial Sequence
  Description of Artificial Sequence: Synthetic primer
tggtggtggaacttatctgattt

SEQ ID NO: 192 - DNA, 21 bp, Artificial Sequence
  Description of Artificial Sequence: Synthetic primer
agggggtacacattctcctga

SEQ ID NO: 193 - DNA, 20 bp, Artificial Sequence
  Description of Artificial Sequence: Synthetic primer
gacctctgggttccattggg

SEQ ID NO: 194 - DNA, 20 bp, Artificial Sequence
  Description of Artificial Sequence: Synthetic primer
caaagcccaatggaacccag

SEQ ID NO: 195 - DNA, 20 bp, Artificial Sequence
  Description of Artificial Sequence: Synthetic primer
gaaggggctttcccaacagt

SEQ ID NO: 196 - DNA, 20 bp, Artificial Sequence
  Description of Artificial Sequence: Synthetic primer
gcccaagacagggaaaacga

SEQ ID NO: 197 - DNA, 20 bp, Artificial Sequence
  Description of Artificial Sequence: Synthetic primer
tgacaactctggtcgctctg

SEQ ID NO: 198 - DNA, 20 bp, Artificial Sequence
  Description of Artificial Sequence: Synthetic primer
cagagagcctcggctaggta

SEQ ID NO: 199 - DNA, 20 bp, Artificial Sequence
  Description of Artificial Sequence: Synthetic primer
aatggctccgtccgtattcc

SEQ ID NO: 200 - DNA, 20 bp, Artificial Sequence
  Description of Artificial Sequence: Synthetic primer
gggaagtcgggagcatatcg

SEQ ID NO: 201 - DNA, 20 bp, Artificial Sequence
  Description of Artificial Sequence: Synthetic primer
cactcccgaggctgtaactg

SEQ ID NO: 202 - DNA, 20 bp, Artificial Sequence
  Description of Artificial Sequence: Synthetic primer
atggcgtgttttggttggag

SEQ ID NO: 203 - DNA, 20 bp, Artificial Sequence
  Description of Artificial Sequence: Synthetic primer
ggagccactttcactgaccc

SEQ ID NO: 204 - DNA, 20 bp, Artificial Sequence
  Description of Artificial Sequence: Synthetic primer
gggagggtcagtgaaagtgg

SEQ ID NO: 205 - DNA, 19 bp, Artificial Sequence
  Description of Artificial Sequence: Synthetic primer
gagggccgtaccaaagacc

SEQ ID NO: 206 - DNA, 20 bp, Artificial Sequence
  Description of Artificial Sequence: Synthetic primer
ggtcccaaatgagcgaaacc

SEQ ID NO: 207 - DNA, 20 bp, Artificial Sequence
  Description of Artificial Sequence: Synthetic primer
gggtccgagagcaggtagag

SEQ ID NO: 208 - DNA, 20 bp, Artificial Sequence
  Description of Artificial Sequence: Synthetic primer
ccgcctgaaggacgagacta

SEQ ID NO: 209 - DNA, 20 bp, Artificial Sequence
  Description of Artificial Sequence: Synthetic primer
cagggcggtccttaggaaaa

SEQ ID NO: 210 - DNA, 20 bp, Artificial Sequence
  Description of Artificial Sequence: Synthetic primer
gggagtgccgcaataccttt

SEQ ID NO: 211 - DNA, 20 bp, Artificial Sequence
  Description of Artificial Sequence: Synthetic primer
gaaattgggctcgtcctcgt

SEQ ID NO: 212 - DNA, 20 bp, Artificial Sequence
  Description of Artificial Sequence: Synthetic primer
cgaggacgagcccaatttct

SEQ ID NO: 213 - DNA, 20 bp, Artificial Sequence
  Description of Artificial Sequence: Synthetic primer
agtgagggggcctaaggttt

SEQ ID NO: 214 - DNA, 20 bp, Artificial Sequence
  Description of Artificial Sequence: Synthetic primer
actaccactgcgattggacc

SEQ ID NO: 215 - DNA, 21 bp, Artificial Sequence
  Description of Artificial Sequence: Synthetic primer
aggagccagtaatggagttgt

SEQ ID NO: 216 - DNA, 22 bp, Artificial Sequence
  Description of Artificial Sequence: Synthetic primer
cacaactccattactggctcct

SEQ ID NO: 217 - DNA, 20 bp, Artificial Sequence
  Description of Artificial Sequence: Synthetic primer
ggagggtagcattccagagg

SEQ ID NO: 218 - DNA, 19 bp, Artificial Sequence
  Description of Artificial Sequence: Synthetic primer
ccattcacttcgcatccct

SEQ ID NO: 219 - DNA, 22 bp, Artificial Sequence
  Description of Artificial Sequence: Synthetic primer
ttgcagatgattgcttcctttc

SEQ ID NO: 220 - DNA, 21 bp, Artificial Sequence
  Description of Artificial Sequence: Synthetic primer
agggggtacacattctcctga

SEQ ID NO: 221 - DNA, 20 bp, Artificial Sequence
  Description of Artificial Sequence: Synthetic primer
gacctctgggttccattggg

SEQ ID NO: 222 - DNA, 20 bp, Artificial Sequence
  Description of Artificial Sequence: Synthetic primer
gaaggggctttcccaacagt

SEQ ID NO: 223 - DNA, 20 bp, Artificial Sequence
  Description of Artificial Sequence: Synthetic primer
gtggcgtatgccccagtatc

SEQ ID NO: 224 - skipped

SEQ ID NO: 225 - DNA, 26 bp, Artificial Sequence
  Description of Artificial Sequence: Synthetic oligonucleotide
acaccgccggggccgcctagagaagg

SEQ ID NO: 226 - DNA, 26 bp, Artificial Sequence
  Description of Artificial Sequence: Synthetic oligonucleotide
aaaaccttctctaggcggccccggcg

SEQ ID NO: 227 - DNA, 22 bp, Artificial Sequence
  Description of Artificial Sequence: Synthetic primer
cttcgtgaaaccgctgtttatt

SEQ ID NO: 228 - DNA, 22 bp, Artificial Sequence
  Description of Artificial Sequence: Synthetic primer
gactggaggactttgtcttctt

SEQ ID NO: 229 - DNA, 22 bp, Artificial Sequence
  Description of Artificial Sequence: Synthetic primer
tgagttccttacgtggaatgtg

SEQ ID NO: 230 - DNA, 21 bp, Artificial Sequence
  Description of Artificial Sequence: Synthetic primer
tcttcaggagatctgggttct

SEQ ID NO: 231 - DNA, 20 bp, Artificial Sequence
  Description of Artificial Sequence: Synthetic primer
ctgctctgcaaacactcaga

SEQ ID NO: 232 - DNA, 18 bp, Artificial Sequence
  Description of Artificial Sequence: Synthetic primer
tcagcagcagtacctcca

SEQ ID NO: 233 - DNA, 69 bp, Artificial Sequence
  Description of Artificial Sequence: Synthetic oligonucleotide
gccgcctctaatacgactcactatagggccgccggggccgcctagagagttttagagctagaaatagca

SEQ ID NO: 234 - DNA, 72 bp, Artificial Sequence
  Description of Artificial Sequence: Synthetic oligonucleotide
gccgcctctaatacgactcactatagggccggcctcagaccccacacagaggttttagagctagaaatagca

SEQ ID NO: 235 - DNA, 69 bp, Artificial Sequence
  Description of Artificial Sequence: Synthetic oligonucleotide
gcggcctctaatacgactcactataggggagaaaataatgaatgtcaagttttagagctagaaatagca

SEQ ID NO: 236 - DNA, 22 bp, Artificial Sequence
  Description of Artificial Sequence: Synthetic primer
ttgagcctgtgcatcgcagcgt

SEQ ID NO: 237 - DNA, 40 bp, Artificial Sequence
  Description of Artificial Sequence: Synthetic primer
ctacttttaatgcaagctggtgacttggctgataactagg

SEQ ID NO: 238 - DNA, 33 bp, Artificial Sequence
  Description of Artificial Sequence: Synthetic primer
aaattaaggtagaacgcactccttagcgctcgt

SEQ ID NO: 239 - DNA, 34 bp, Artificial Sequence
  Description of Artificial Sequence: Synthetic primer
attttgggcttccatgttggtgacaaaacaaggg

SEQ ID NO: 240 - DNA, 918 bp, Artificial Sequence
  Description of Artificial Sequence: Synthetic polynucleotide
atgtggccccttgtcgctgcccttcttttgggctctgcatgttgcggctccgcacagctccttttcaacaaaacgaagtcagttgagttcaccttctgtaatgataccgttgtgatcccttgttttgtcaccaacatggaagcccaaaatacgactgaggtctacgtcaagtggaaattcaaggggagggatatttatacgtttgatggtgctctgaataaatctacggttccgacggattttagttccgcaaagattgaagtgtctcagctgttgaagggtgacgcttccctgaaaatggataaatccgatgccgttagccatacggggaattacacctgcgaggttaccgaactcacccgcgagggggagacgataatagaacttaagtatagggtggttagctggttctctccaaacgagaacattctgatagttattttcccaatcttcgctatattgctgttctggggtcaattcggcattaaaacgcttaaatataggagcggcgggatggacgagaaaacgatcgccttgcttgtcgcaggtttggttatcaccgtcattgtgattgtcggagccatcctgtttgtccctggtgagtatagcttgaaaaatgccactggcctcggtctgatcgtgacgtccactggcatccttatactccttcattattatgtgttcagtactgccattggtcttacgtcttttgtgattgccatcctcgtcattcaggtcatcgcatacatactcgcagtcgtcggtttgagcctgtgcatcgcagcgtgcattcccatgcacggacctctcttgatctctggtctttctatattggcgctggcacaacttcttggcttggtttacatgaagtttgtcgcctctaatcagaagacgatccaacccccgcgcaacaactga

SEQ ID NO: 241 - DNA, 44 bp, Artificial Sequence
  Description of Artificial Sequence: Synthetic primer
cttcgtgaaaccgctgtttattgagcagagctcactagaacttg

SEQ ID NO: 242 - DNA, 45 bp, Artificial Sequence
  Description of Artificial Sequence: Synthetic primer
gactggaggactttgtcttcttaagagacaagcctcagactaaac

SEQ ID NO: 243 - DNA, 24 bp, Artificial Sequence
  Description of Artificial Sequence: Synthetic primer
ttccactctgggtgtatttaatct

SEQ ID NO: 244 - DNA, 20 bp, Artificial Sequence
  Description of Artificial Sequence: Synthetic primer
ccggatccttaagccaaaga

SEQ ID NO: 245 - DNA, 20 bp, Artificial Sequence
  Description of Artificial Sequence: Synthetic primer
gctcagcctagggtttcaat

SEQ ID NO: 246 - DNA, 19 bp, Artificial Sequence
  Description of Artificial Sequence: Synthetic primer
atgagcaaggcaggaatgt

SEQ ID NO: 247 - DNA, 20 bp, Artificial Sequence
  Description of Artificial Sequence: Synthetic primer
agtttgggactgcctcattt

SEQ ID NO: 248 - DNA, 21 bp, Artificial Sequence
  Description of Artificial Sequence: Synthetic primer
ggagcagggaaacctgataaa

SEQ ID NO: 249 - DNA, 34 bp, Artificial Sequence
  Description of Artificial Sequence: Synthetic primer
gccactgttccctcagcgacccgctctgcacaaa

SEQ ID NO: 250 - DNA, 43 bp, Artificial Sequence
  Description of Artificial Sequence: Synthetic primer
cgttgcctatagcgtcttcttcagaggtaacgacgagaacaaa

SEQ ID NO: 251 - DNA, 17 bp, Artificial Sequence
  Description of Artificial Sequence: Synthetic primer
gacccgctctgcacaaa

SEQ ID NO: 252 - DNA, 22 bp, Artificial Sequence
  Description of Artificial Sequence: Synthetic primer
cagaggtaacgacgagaacaaa

SEQ ID NO: 253 - DNA, 22 bp, Artificial Sequence
  Description of Artificial Sequence: Synthetic primer
ggagttacagggaatccgaatg

SEQ ID NO: 254 - DNA, 22 bp, Artificial Sequence
  Description of Artificial Sequence: Synthetic primer
catgaagccaagatctaggaag

SEQ ID NO: 255 - DNA, 61 bp, Artificial Sequence
  Description of Artificial Sequence: Synthetic primer
ctgctctgcaaacactcagatgagtgccaaggtgaagttctgagtgccaaggtgaagttct

SEQ ID NO: 256 - DNA, 57 bp, Artificial Sequence
  Description of Artificial Sequence: Synthetic primer
tcagcagcagtacctccacaaagcagtgcaggaagcagaagatggcacggatgtgag

SEQ ID NO: 257 - DNA, 19 bp, Artificial Sequence
  Description of Artificial Sequence: Synthetic primer
ctgccaccgaacctacatc

SEQ ID NO: 258 - DNA, 17 bp, Artificial Sequence
  Description of Artificial Sequence: Synthetic primer
gtggtcttgcccatgcc

SEQ ID NO: 259 - DNA, 21 bp, Artificial Sequence
  Description of Artificial Sequence: Synthetic primer
catcagtcctggtgatgatcc

SEQ ID NO: 260 - DNA, 20 bp, Artificial Sequence
  Description of Artificial Sequence: Synthetic primer
gatgagtgggaagatgacct

SEQ ID NO: 261 - DNA, 135 bp, Artificial Sequence
  Description of Artificial Sequence: Synthetic oligonucleotide
caggaggggactgttgcagggggccccaaggcagaagatggcacggatgtgagcattcgggacctcttcagtgccaaagccaacaagggcccgagagtcacggtgcttctgggaaaggcgggcatgggcaagacc

SEQ ID NO: 262 - DNA, 135 bp, Artificial Sequence
  Description of Artificial Sequence: Synthetic oligonucleotide
atgctgcttgtctcaactgtaatggttgtgttttgggaatacatcaacaggtaattatgaaacatgatgaaatgatgttgatgaaagtctcctctaatctcctagttatcagccaagtcaccagcttgcattaaa

SEQ ID NO: 263 - DNA, 20 bp, Artificial Sequence
  Description of Artificial Sequence: Synthetic primer
cgcctagagaagaggctgtg

SEQ ID NO: 264 - DNA, 18 bp, Artificial Sequence
  Description of Artificial Sequence: Synthetic primer
actcccataaaggtattg

SEQ ID NO: 265 - DNA, 3 bp, Artificial Sequence
  Description of Artificial Sequence: Synthetic oligonucleotide
  modified_base (1)..(1): a, c, t, g, unknown or other
ngg

SEQ ID NO: 266 - DNA, 26 bp, Artificial Sequence
  Description of Artificial Sequence: Synthetic primer
acaccggggagagaagcagaggatgg

SEQ ID NO: 267 - DNA, 26 bp, Artificial Sequence
  Description of Artificial Sequence: Synthetic primer
aaaaccatcctctgcttctctccccg

SEQ ID NO: 268 - DNA, 110 bp, Artificial Sequence
  Description of Artificial Sequence: Synthetic polynucleotide
gaaaggacgaaacaccgggtcttcgagaagacctgttttagagctagaaatagcaagttaaaataaggctagtccgttatcaacttgaaaaagtggcaccgagtcggtgc

SEQ ID NO: 269 - DNA, 22 bp, Artificial Sequence
  Description of Artificial Sequence: Synthetic primer
gccttttgctggccttttgctc

SEQ ID NO: 270 - DNA, 505 bp, Artificial Sequence
  Description of Artificial Sequence: Synthetic polynucleotide
ttcctggccttttgctggccttttgctcacatgtgagggcctatttcccatgattccttcatatttgcatatacgatacaaggctgttagagagataattggaattaatttgactgtaaacacaaagatattagtacaaaatacgtgacgtagaaagtaataatttcttgggtagtttgcagttttaaaattatgttttaaaatggactatcatatgcttaccgtaacttgaaagtatttcgatttcttggctttatatatcttgtggaaaggacgaaaacaccggggagagaagcagaggatggtttttagagctagaaatagcaagttaaaataaggctagtccgttatcaacttgaaaaagtggcaccgagtcggtgcttttttgttttagagctagaaatagcaagttaaaataaggctagtccgtttttagcgcgtgcgccaattctgcagacaaatggctctagaggtacccgttacataacttacggtaaatggcccg

SEQ ID NO: 271 - DNA, 28 bp, Artificial Sequence
  Description of Artificial Sequence: Synthetic primer
cgggccatttaccgtaagttatgtaacg

SEQ ID NO: 272 - DNA, 127 bp, Artificial Sequence
  Description of Artificial Sequence: Synthetic polynucleotide
gctttatatatcttgtggaaaggacgaaaacaccggggagagaagcagaggatggtttttagagctagaaatagcaagttaaaataaggctagtccgttatcaacttgaaaaagtggcaccgagtcg

SEQ ID NO: 273 - DNA, 127 bp, Artificial Sequence; identical to SEQ ID NO: 272
  Description of Artificial Sequence: Synthetic polynucleotide

SEQ ID NO: 274 - DNA, 126 bp, Artificial Sequence
  Description of Artificial Sequence: Synthetic polynucleotide
gctttatatatcttgtggaaaggacgaaacaccggggagagaagcagaggatggtttttagagctagaaatagcaagttaaaataaggctagtccgttatcaacttgaaaaagtggcaccgagtcg

SEQ ID NO: 275 - DNA, 26 bp, Artificial Sequence
  Description of Artificial Sequence: Synthetic primer
acaccgtagaaaaggatgaagaaaag

SEQ ID NO: 276 - DNA, 26 bp, Artificial Sequence
  Description of Artificial Sequence: Synthetic primer
aaaacttttcttcatccttttctacg

SEQ ID NO: 277 - DNA, 110 bp, Artificial Sequence; identical to SEQ ID NO: 268
  Description of Artificial Sequence: Synthetic polynucleotide

SEQ ID NO: 278 - DNA, 22 bp, Artificial Sequence
  Description of Artificial Sequence: Synthetic primer
gccttttgctggccttttgctc

SEQ ID NO: 279 - DNA, 600 bp, Artificial Sequence
  Description of Artificial Sequence: Synthetic polynucleotide
tgagcgtcgatttttgtgatgctcgtcaggggggcggagcctatggaaaaacgccagcaacgcggcctttttacggttcctggccttttgctggccttttgctcacatgtgagggcctatttcccatgattccttcatatttgcatatacgatacaaggctgttagagagataattggaattaatttgactgtaaacacaaagatattagtacaaaatacgtgacgtagaaagtaataatttcttgggtagtttgcagttttaaaattatgttttaaaatggactatcatatgcttaccgtaacttgaaagtatttcgatttcttggctttatatatcttgtggaaaggacgaaacaccacaccgtagaaaaggatgaagaaaagttttgttttagagctagaaatagcaagttaaaataaggctagtccgttatcaacttgaaaaagtggcaccgagtcggtgcttttttgttttagagctagaaatagcaagttaaaataaggctagtccgtttttagcgcgtgcgccaattctgcagacaaatggctctagaggtacccgttacataacttacggtaaatggcccgcctggctgacc

SEQ ID NO: 280 - DNA, 28 bp, Artificial Sequence
  Description of Artificial Sequence: Synthetic primer
cgggccatttaccgtaagttatgtaacg

SEQ ID NO: 281 - DNA, 122 bp, Artificial Sequence
  Description of Artificial Sequence: Synthetic polynucleotide
gatttcttggctttatatatcttgtggaaaggacgaaaacaccgtagaaaaggatgaagaaaagtttttagagctagaaatagcaagttaaaataaggctagtccgttatcaacttgaaaaa

SEQ ID NO: 282 - DNA, 122 bp, Artificial Sequence; identical to SEQ ID NO: 281
  Description of Artificial Sequence: Synthetic polynucleotide

SEQ ID NO: 283 - DNA, 121 bp, Artificial Sequence
  Description of Artificial Sequence: Synthetic polynucleotide
gatttcttggctttatatatcttgtggaaaggacgaaacaccgtagaaaaggatgaagaaaagtttttagagctagaaatagcaagttaaaataaggctagtccgttatcaacttgaaaaa

SEQ ID NO: 284 - DNA, 26 bp, Artificial Sequence
  Description of Artificial Sequence: Synthetic primer
acaccggcctcagaccccacacagag

SEQ ID NO: 285 - DNA, 26 bp, Artificial Sequence
  Description of Artificial Sequence: Synthetic primer
aaaactctgtgtggggtctgaggccg

SEQ ID NO: 286 - DNA, 110 bp, Artificial Sequence; identical to SEQ ID NO: 268
  Description of Artificial Sequence: Synthetic polynucleotide

SEQ ID NO: 287 - DNA, 22 bp, Artificial Sequence
  Description of Artificial Sequence: Synthetic primer
gccttttgctggccttttgctc

SEQ ID NO: 288 - DNA, 554 bp, Artificial Sequence
  Description of Artificial Sequence: Synthetic polynucleotide
caacgcggcctttttacggttcctggccttttgctggccttttgctcacatgtgagggcctatttcccatgattccttcatatttgcatatacgatacaaggctgttagagagataattggaattaatttgactgtaaacacaaagatattagtacaaaatacgtgacgtagaaagtaataatttcttgggtagtttgcagttttaaaattatgttttaaaatggactatcatatgcttaccgtaacttgaaagtatttcgatttcttggctttatatatcttgtggaaaggacgaaaacaccggcctcagaccccacacagagtttttagagctagaaatagcaagttaaaataaggctagtccgttatcaacttgaaaaagtggcaccgagtcggtgcttttttgttttagagctagaaatagcaagttaaaataaggctagtccgtttttagcgcgtgcgccaattctgcagacaaatggctctagaggtacccgttacataacttacggtaaatggcccgcctggctgaccgcccaacgacccccgccca

SEQ ID NO: 289 - DNA, 28 bp, Artificial Sequence
  Description of Artificial Sequence: Synthetic primer
cgggccatttaccgtaagttatgtaacg

SEQ ID NO: 290 - DNA, 121 bp, Artificial Sequence
  Description of Artificial Sequence: Synthetic polynucleotide
gtatttcgatttcttggctttatatatcttgtggaaaggacgaaaacaccggcctcagaccccacacagagtttttagagctagaaatagcaagttaaaataaggctagtccgttatcaac

SEQ ID NO: 291 - DNA, 121 bp, Artificial Sequence; identical to SEQ ID NO: 290
  Description of Artificial Sequence: Synthetic polynucleotide

SEQ ID NO: 292 - DNA, 119 bp, Artificial Sequence
  Description of Artificial Sequence: Synthetic polynucleotide
gtatttcgatttcttggctttatatatcttgtggaaaggacgaaacaccggcctcagaccccacacagagttttagagctagaaatagcaagttaaaataaggctagtccgttatcaac

SEQ ID NO: 293 - DNA, 26 bp, Artificial Sequence
  Description of Artificial Sequence: Synthetic primer
acaccgcaaggggatattcgggtttg

SEQ ID NO: 294 - DNA, 26 bp, Artificial Sequence
  Description of Artificial Sequence: Synthetic primer
aaaacaaacccgaatatccccttgcg

SEQ ID NO: 295 - DNA, 110 bp, Artificial Sequence; identical to SEQ ID NO: 268
  Description of Artificial Sequence: Synthetic polynucleotide

SEQ ID NO: 296 - DNA, 22 bp, Artificial Sequence
  Description of Artificial Sequence: Synthetic primer
gccttttgctggccttttgctc

SEQ ID NO: 297 - DNA, 536 bp, Artificial Sequence
  Description of Artificial Sequence: Synthetic polynucleotide
tttacggttcctggccttttgctggccttttgctcacatgtgagggcctatttcccatgattccttcatatttgcatatacgatacaaggctgttagagagataattggaattaatttgactgtaaacacaaagatattagtacaaaatacgtgacgtagaaagtaataatttcttgggtagtttgcagttttaaaattatgttttaaaatggactatcatatgcttaccgtaacttgaaagtatttcgatttcttggctttatatatcttgtggaaaggacgaaaacaccgcaaggggatattcgggtttgtttttagagctagaaatagcaagttaaaataaggctagtccgttatcaacttgaaaaagtggcaccgagtcggtgcttttttgttttagagctagaaatagcaagttaaaataaggctagtccgtttttagcgcgtgcgccaattctgcagacaaatggctctagaggtacccgttacataacttacggtaaatggcccgcctggctgaccgcccaacgacccc

SEQ ID NO: 298 - DNA, 28 bp, Artificial Sequence
  Description of Artificial Sequence: Synthetic primer
cgggccatttaccgtaagttatgtaacg

SEQ ID NO: 299 - DNA, 99 bp, Artificial Sequence
  Description of Artificial Sequence: Synthetic oligonucleotide
ggctttatatatcttgtggaaaggacgaaaacaccgcaaggggatattcgggtttgtttttagagctagaaatagcaagttaaaataaggctagtccgt

SEQ ID NO: 300 - DNA, 99 bp, Artificial Sequence; identical to SEQ ID NO: 299
  Description of Artificial Sequence: Synthetic oligonucleotide

SEQ ID NO: 301 - DNA, 98 bp, Artificial Sequence
  Description of Artificial Sequence: Synthetic oligonucleotide
ggctttatatatcttgtggaaaggacgaaacaccgcaaggggatattcgggtttgtttttagagctagaaatagcaagttaaaataaggctagtccgt

SEQ ID NO: 302 - DNA, 26 bp, Artificial Sequence
  Description of Artificial Sequence: Synthetic primer
acaccgtgcttttggtcctgagcgtg

SEQ ID NO: 303 - DNA, 26 bp, Artificial Sequence
  Description of Artificial Sequence: Synthetic primer
aaaacacgctcaggaccaaaagcacg

SEQ ID NO: 304 - DNA, 110 bp, Artificial Sequence; identical to SEQ ID NO: 268
  Description of Artificial Sequence: Synthetic polynucleotide

SEQ ID NO: 305 - DNA, 22 bp, Artificial Sequence
  Description of Artificial Sequence: Synthetic primer
gccttttgctggccttttgctc

SEQ ID NO: 306 - DNA, 600 bp, Artificial Sequence
  Description of Artificial Sequence: Synthetic polynucleotide
cgtcaggggggcggagcctatggaaaaacgccagcaacgcggcctttttacggttcctggccttttgctggccttttgctcacatgtgagggcctatttcccatgattccttcatatttgcatatacgatacaaggctgttagagagataattggaattaatttgactgtaaacacaaagatattagtacaaaatacgtgacgtagaaagtaataatttcttgggtagtttgcagttttaaaattatgttttaaaatggactatcatatgcttaccgtaacttgaaagtatttcgatttcttggctttatatatcttgtggaaaggacgaaaacaccgtgcttttggtcctgagcgtgtttttagagctagaaatagcaagttaaaataaggctagtccgttatcaacttgaaaaagtggcaccgagtcggtgcttttttgttttagagctagaaatagcaagttaaaataaggctagtccgtttttagcgcgtgcgccaattctgcagacaaatggctctagaggtacccgttacataacttacggtaaatggcccgcctggctgaccgcccaacgacccccgcccattgacgtcaata

SEQ ID NO: 307 - DNA, 28 bp, Artificial Sequence
  Description of Artificial Sequence: Synthetic primer
cgggccatttaccgtaagttatgtaacg

SEQ ID NO: 308 - DNA, 99 bp, Artificial Sequence
  Description of Artificial Sequence: Synthetic oligonucleotide
ggctttatatatcttgtggaaaggacgaaaacaccgtgcttttggtcctgagcgtgtttttagagctagaaatagcaagttaaaataaggctagtccgt

SEQ ID NO: 309 - DNA, 99 bp, Artificial Sequence; identical to SEQ ID NO: 308
  Description of Artificial Sequence: Synthetic oligonucleotide

SEQ ID NO: 310 - DNA, 97 bp, Artificial Sequence
  Description of Artificial Sequence: Synthetic oligonucleotide
ggctttatatatcttgtggaaaggacgaaacaccgtgcttttggtcctgagcgtgttttagagctagaaatagcaagttaaaataaggctagtccgt

SEQ ID NO: 311 - DNA, 26 bp, Artificial Sequence
  Description of Artificial Sequence: Synthetic primer
acaccgccggggccgcctagagaagg

SEQ ID NO: 312 - DNA, 26 bp, Artificial Sequence
  Description of Artificial Sequence: Synthetic primer
aaaaccttctctaggcggccccggcg

SEQ ID NO: 313 - DNA, 110 bp, Artificial Sequence; identical to SEQ ID NO: 268
  Description of Artificial Sequence: Synthetic polynucleotide

SEQ ID NO: 314 - DNA, 22 bp, Artificial Sequence
  Description of Artificial Sequence: Synthetic primer
gccttttgctggccttttgctc

SEQ ID NO: 315 - DNA, 600 bp, Artificial Sequence
  Description of Artificial Sequence: Synthetic polynucleotide
cgtcaggggggcggagcctatggaaaaacgccagcaacgcggcctttttacggttcctggccttttgctggccttttgctcacatgtgagggcctatttcccatgattccttcatatttgcatatacgatacaaggctgttagagagataattggaattaatttgactgtaaacacaaagatattagtacaaaatacgtgacgtagaaagtaataatttcttgggtagtttgcagttttaaaattatgttttaaaatggactatcatatgcttaccgtaacttgaaagtatttcgatttcttggctttatatatcttgtggaaaggacgaaaacaccgccggggccgcctagagaaggtttttagagctagaaatagcaagttaaaataaggctagtccgttatcaacttgaaaaagtggcaccgagtcggtgcttttttgttttagagctagaaatagcaagttaaaataaggctagtccgtttttagcgcgtgcgccaattctgcagacaaatggctctagaggtacccgttacataacttacggtaaatggcccgcctggctgaccgcccaacgacccccgcccattgacgtcaata

SEQ ID NO: 316 - DNA, 28 bp, Artificial Sequence
  Description of Artificial Sequence: Synthetic primer
cgggccatttaccgtaagttatgtaacg

SEQ ID NO: 317 - DNA, 100 bp, Artificial Sequence
  Description of Artificial Sequence: Synthetic polynucleotide
cgatttcttggctttatatatcttgtggaaaggacgaaaacaccgccggggccgcctagagaaggtttttagagctagaaatagcaagttaaaataaggc

SEQ ID NO: 318 - DNA, 100 bp, Artificial Sequence; identical to SEQ ID NO: 317
  Description of Artificial Sequence: Synthetic polynucleotide

SEQ ID NO: 319 - DNA, 99 bp, Artificial Sequence
  Description of Artificial Sequence: Synthetic oligonucleotide
cgatttcttggctttatatatcttgtggaaaggacgaaacaccgccggggccgcctagagaaggtttttagagctagaaatagcaagttaaaataaggc

SEQ ID NO: 320 - DNA, 102 bp, Artificial Sequence
  Description of Artificial Sequence: Synthetic polynucleotide
gcagagctcactagaacttgtttcgccttttactctggggggagagaagcagaggatgaggagaaaataatgaatgtcaaaggaagagtggttctgtcaatg

SEQ ID NO: 321 - DNA, 102 bp, Artificial Sequence; identical to SEQ ID NO: 320
  Description of Artificial Sequence: Synthetic polynucleotide

SEQ ID NO: 322 - DNA, 61 bp, Artificial Sequence
  Description of Artificial Sequence: Synthetic oligonucleotide
gcagagctcactagaacttgtttcgccttttactctggggggagagaagcagaggatgagg

SEQ ID NO: 323 - DNA, 61 bp, Artificial Sequence; identical to SEQ ID NO: 322
  Description of Artificial Sequence: Synthetic oligonucleotide

SEQ ID NO: 324 - DNA, 61 bp, Artificial Sequence; identical to SEQ ID NO: 322
  Description of Artificial Sequence: Synthetic oligonucleotide

SEQ ID NO: 325 - DNA, 61 bp, Artificial Sequence; identical to SEQ ID NO: 322
  Description of Artificial Sequence: Synthetic oligonucleotide

SEQ ID NO: 326 - DNA, 61 bp, Artificial Sequence; identical to SEQ ID NO: 322
  Description of Artificial Sequence: Synthetic oligonucleotide

SEQ ID NO: 327 - DNA, 61 bp, Artificial Sequence; identical to SEQ ID NO: 322
  Description of Artificial Sequence: Synthetic oligonucleotide

SEQ ID NO: 328 - DNA, 61 bp, Artificial Sequence; identical to SEQ ID NO: 322
  Description of Artificial Sequence: Synthetic oligonucleotide

SEQ ID NO: 329 - DNA, 59 bp, Artificial Sequence
  Description of Artificial Sequence: Synthetic oligonucleotide
agagctcactagaacttgtttcgccttttactctggggggagagaagcagaggatgagg

SEQ ID NO: 330 - DNA, 59 bp, Artificial Sequence; identical to SEQ ID NO: 329
  Description of Artificial Sequence: Synthetic oligonucleotide

SEQ ID NO: 331 - DNA, 59 bp, Artificial Sequence; identical to SEQ ID NO: 329
  Description of Artificial Sequence: Synthetic oligonucleotide

SEQ ID NO: 332 - DNA, 105 bp, Artificial Sequence
  Description of Artificial Sequence: Synthetic polynucleotide
agagctcactagaacttgtttcgccttttactctggggggagagaagcagaggatgaggtacgtgaaacgttgaaatgatttacctccgctttgctggggtcacc

SEQ ID NO: 333 - DNA, 59 bp, Artificial Sequence; identical to SEQ ID NO: 329
  Description of Artificial Sequence: Synthetic oligonucleotide

SEQ ID NO: 334 - DNA, 59 bp, Artificial Sequence; identical to SEQ ID NO: 329
  Description of Artificial Sequence: Synthetic oligonucleotide

SEQ ID NO: 335 - DNA, 59 bp, Artificial Sequence; identical to SEQ ID NO: 329
  Description of Artificial Sequence: Synthetic oligonucleotide

SEQ ID NO: 336 - DNA, 66 bp, Artificial Sequence
  Description of Artificial Sequence: Synthetic oligonucleotide
ctccccaacatggacctgggtgccaggaacgaggcctcagaccccacacagagggtcgtcctacaa

SEQ ID NO: 337 - DNA, 66 bp, Artificial Sequence; identical to SEQ ID NO: 336
  Description of Artificial Sequence: Synthetic oligonucleotide

SEQ ID NO: 338 - DNA, 65 bp, Artificial Sequence
  Description of Artificial Sequence: Synthetic oligonucleotide
ctccccacatggacctgggtgccaggaacgaggcctcagaccccacacagagggtcgtcctacaa

SEQ ID NO: 339 - DNA, 64 bp, Artificial Sequence
  Description of Artificial Sequence: Synthetic oligonucleotide
ctcccacatggacctgggtgccaggaacgaggcctcagaccccacacagagggtcgtcctacaa

SEQ ID NO: 340 - DNA, 65 bp, Artificial Sequence; identical to SEQ ID NO: 338
  Description of Artificial Sequence: Synthetic oligonucleotide

SEQ ID NO: 341 - DNA, 66 bp, Artificial Sequence; identical to SEQ ID NO: 336
  Description of Artificial Sequence: Synthetic oligonucleotide

SEQ ID NO: 342 - DNA, 65 bp, Artificial Sequence
  Description of Artificial Sequence: Synthetic oligonucleotide
ctcccaccatggacctgggtgccaggaacgaggcctcagaccccacacagagggtcgtcctacaa

SEQ ID NO: 343 - DNA, 167 bp, Artificial Sequence
  Description of Artificial Sequence: Synthetic polynucleotide
tggacctgggtgccaggaacgaggcctcagaccccacacagagggtcgtcctacaactcagaaaactgcgtacccagagtcagatcacctggcaggcgttcatccactgtgtgtgcatggagctggacgtgccgctggacctggaggtactgctgctgagcacctgg

SEQ ID NO: 344 - DNA, 167 bp, Artificial Sequence; identical to SEQ ID NO: 343
  Description of Artificial Sequence: Synthetic polynucleotide

SEQ ID NO: 345 - DNA, 159 bp, Artificial Sequence
  Description of Artificial Sequence: Synthetic polynucleotide
tggacctgggtgccaggaacgaggcctcagaccccacacagagggtcgtcctacaactcagaaaactgcgtacccagagtcagatcacctggcaggcgttcatccactgtgtgtgcatggagctggacgtgccgctggacctggaggtactgctgctga

SEQ ID NO: 346 - DNA, 159 bp, Artificial Sequence; identical to SEQ ID NO: 345
  Description of Artificial Sequence: Synthetic polynucleotide

SEQ ID NO: 347 - DNA, 159 bp, Artificial Sequence; identical to SEQ ID NO: 345
  Description of Artificial Sequence: Synthetic polynucleotide

SEQ ID NO: 348 - DNA, 159 bp, Artificial Sequence; identical to SEQ ID NO: 345
  Description of Artificial Sequence: Synthetic polynucleotide

SEQ ID NO: 349 - DNA, 159 bp, Artificial Sequence; identical to SEQ ID NO: 345
  Description of Artificial Sequence: Synthetic polynucleotide

SEQ ID NO: 350 - DNA, 85 bp, Artificial Sequence
  Description of Artificial Sequence: Synthetic oligonucleotide
agtcagatcacctggcaggcgttcatccactgtgtgtgcatggagctggacgtgccgctggacctggaggtactgctgctgaaaa

SEQ ID NO: 351 - DNA, 83 bp, Artificial Sequence
  Description of Artificial Sequence: Synthetic oligonucleotide
atcacctggcaggcgttcatccactgtgtgtgcatggagctggacgtgccgctggacctggaggtactgctgctgaaacggac

SEQ ID NO: 352 - DNA, 128 bp, Artificial Sequence
  Description of Artificial Sequence: Synthetic polynucleotide
acacagagggtcgtcctacaactcagaaaactgcgtacccagagtcagatcacctggcaggcgttcatccactgtgtgtgcatggagctggacgtgccgctggacctggaggtactgctgctgagcac

SEQ ID NO: 353 - DNA, 104 bp, Artificial Sequence
  Description of Artificial Sequence: Synthetic polynucleotide
tcagaaaactgcgtacccagagtcagatcacctggcaggcgttcatccactgtgtgtgcatggagctggacgtgccgctggacctggaggtactgctgctgaaa

SEQ ID NO: 354 - DNA, 83 bp, Artificial Sequence
  Description of Artificial Sequence: Synthetic oligonucleotide
tcagatcacctggcaggcgttcatccactgtgtgtgcatggagctggacgtgccgctggacctggaggtactgctgctgaaat

SEQ ID NO: 355 - DNA, 81 bp, Artificial Sequence
  Description of Artificial Sequence: Synthetic oligonucleotide
agatcacctggcaggcgttcatccactgtgtgtgcatggagctggacgtgccgctggacctggaggtactgctgctgaaac

SEQ ID NO: 356 - DNA, 1856 bp, Artificial Sequence
  Description of Artificial Sequence: Synthetic polynucleotide
ggtgaacacattgcacaagtaacatgagaaagcagaaatgcaggtcatacacgcacccctgacccagaccagcagagctggctgcagcatcaatatccaagagaaagaccacttattcccaagaagtgagacaagcaaagacgctctatagaataaattagcatagaaggggctttcccaacagttaaactttccctbtcahgcgattyacctacttaaaaaccagggctttttcycactaccattcacttcgcatycctggcttvcacgcagagggaaaggcaattcataraggswatatttttctgcctttaaagatattctcaaaagatcgctctccacgcccaaggcagggaaaacgacacaatctggctcaactccaggctagaaccctacaaattcaacggggctatctcagagatactggggcatacgccacdgggagcccaagaatgtgaggtgggggtggcgaaggtcaatgtctttggtgtgggaargaagcagccatctgagataggaasccdgaaaacgagaggaaaggcgtccaggaagattcttabggaggggagatcgvggcccccacgagcgaccagattgtctgtcacaaggccgcgagaacgggggtggggggtggggghtcggggagagaaaaaaawgtgtgctgtgtattttgagmggagggcrgcgagaggcctvtcctcaadkaaaaggyaaacgtggagtaggcagttcccaggaaaaggggtgaagaggcgtdgggggaggggaagcgtccctgacccaggaaagacatgaaaagggtagtggggtcgactagattaagaggggggcctctctccctgggaaagaggggtgttgcaatggtgtgtrcaaggbggcgaggggggatgagaaggggcagcatcctcctgctaagagcctggggagggccaggcccacgacccmgaggagagcgagcgvgggagacggaggaggtgacccttccctcccccggggccggtcgtgaggttcggtctctcttttctgtcggacccttaccttgtcccaggcgctgccgggcctgggcccgggctgcggcgcacggcactcccgggaggcagcaggactcgacttaggcccaacgcggcgccacggcgtttcctggccggaatggcccgtacccgtgaggtgggggtggggggcagaaaaggcggagcgagcaaaggcggggagggggggcagggccagggaaggagggggggggccggcactactgtgttggcggactggcgggactggggctgcgtgagtctctgagcgcaggcgggcggcggccgcccctcccccgcagcggcggcggccagcgccggcgccaggggcacccgggacacgccccctcccgccgcgccattggcctctccgcccaccgccccgcacccattggccvgctcgccgccaatcagcggaagccgccggggccgcctagagaagaggctgtgctttggggctccggctcctcagagagcctcggctaggtaggggagcgggactctggtgggagggvgggtgcggtgcdttggcgggggatgggtggctgvggbggccgtctgdccgvthgcgggggtygcctttccyagtgggacagtcgggaacatawygtttgttacgctggaaggggaagrggrggcgggaggcaggcgggagtgcggcccgccctgcggcaaccggagggggagggagaagggagcggaaacbctcgaawccggacggagccattgctcbcgcagaggggggcagcggaggagcgcttccggctvdcctctcttgtcgctgattggccgcttctcctcccgccgtcccgccgtgtgtgaaaacac

SEQ ID NO: 357 - DNA, 1066 bp, Artificial Sequence
  Description of Artificial Sequence: Synthetic polynucleotide
gctctggggctccggctcctcagagagcctcggctaggtaggggagcgggactctggtttgggggagggccggcggtttggcgggggatgggtgcttgaggtggtctgaccggtagcgggggtcgccttccctagcgggaagtcgggagcatatcgtttgttacgctggaaggggaagaggtggtgagaggcaggcgggagtgcggcccgccctgcggcaaccggagggggagggagaagggagcggaaaagcctggaatacggacggagccattgctcccgcagagggaggagcgcttcctgctcttctcttgtcactgattggccgcttctcctcccgccgtgtgtgaaaacacaaatggcgtgttttggttggagtaaagctcctgtcagttacagcctcgggagtgcgcagcctcccaggaactctcgcattgccccctgggtgggtaggtaggtggggtggagagagctgcacaggcgggcgctgtcggcctcctgcggggggaggggagggtcagtgaaagtggctcccgcgcgggcgtcctgccaccctcccctccgggggagtcggtttacccgccgcctgctcggctttggtatctgattggctgctgaagtcctgggaacggccccttgttattggcttgggtcccaaatgagcgaaaccactacgcgagtcggcagggaggcggtctttggtacggccctccccgaggccagcgccgcagtgtctggcccctcgcccctgcgcaacgtggcaggaagcgcgcgcaggaggcgggggcgggctgccgggccgaggcttctgggtggtggtgactgcggctccgccctgggcgtccgccgcctgaaggacgagactagctctctacctgctctcggacccgtgggggtggggggtggaggaaggagtggggggtcggtcctgctggcttgtgggtgggaggcgcatgttctccaaaaacccgcgcgagctgcaatcctgagggagctgcagtggaggaggcggagagaaggccgcacccttctccgcagggggaggggagtgccgcaatacctttat

SEQ ID NO: 358 - DNA, 1000 bp, Artificial Sequence
  Description of Artificial Sequence: Synthetic polynucleotide
aatgtctttggtgtgggaaaggaagcagccatctgagataggaaccctgaaaacgagaggaaaggcgtccaggaagattcttggggaggggagatcgaggcccccacgagcgaccagattgtctgtcacaaggccgcgagaacgggggtggggggtgggggttcggggagagaaaaaaaagtgtgctgtgtattttgaggggagggcggcgagaggcctatcctcaagtaaaaggtaaacgtggagtaggcagttcccaggaaaaggggtgaagaggcgtggggggaggggaagcgtccctgacccaggaaagacatgaaaagggtagtggggtcgactagattaagaggggggcctctctccctgggaaagaggggtgttgcaatggtgtgtcaagggggcgaggggggatgagaaggggcagcatcctcctgctaagagcctggggagggccaggcccacgaccccgaggagagcgagcgcgggagacggaggaggtgacccttccctcccccggggccggtcgtgaggttcggtctctcttttctgtcggacccttaccttgtcccaggcgctgccgggcctgggcccgggctgcggcgcacggcactcccgggaggcagcaggactcgacttaggcccaacgcggcgccacggcgtttcctggccggaatggcccgtacccgtgaggtgggggtggggggcagaaaaggcggagcgagcaaaggcggggagggggggcagggccagggaaggagggggggggccggcactactgtgttggcggactggcgggactggggctgcgtgagtctctgagcgcaggcgggcggcggccgcccctcccccgcagcggcggcggccagcgccggcgccaggggcacccgggacacgccccctcccgccgcgccattggcctctccgcccaccgccccgcacccattggccvgctcgccgccaatcagcggaagccgccggggccgcctagagaagaggctgt

SEQ ID NO: 359 - DNA, 1497 bp, Artificial Sequence
  Description of Artificial Sequence: Synthetic polynucleotide
agtgtggtactttgtcttgaggagatgtcctggactcacacggaaacttagggctacggaatgaagttctcactcccattaggtgacaggtttttagagaagccaatcagcgtcgccgcggtcctggttctaaagtcctcgctcacccacccggactcattctccccagacgccaaggatggtggtcatggcgccccgaaccctcttcctgctgctctcgggggccctgaccctgaccgagacctgggcgggctcccactccatgaggtatttcagcgccgccgtgtcccggcccggccgcggggagccccgcttcatcgccatgggctacgtggacgacacgcagttcgtgcggttcgacagcgactcggcgtgtccgaggatggagccgcgggcgccgtgggtggagcaggaggggccggagtattgggaagaggagacacggaacaccaaggcccacgcacagactgacagaatgaacctgcagaccctgcgcggctactacaaccagagcgaggccagttctcacaccctccagtggatgattggctgcgacctggggtccgacggacgcctcctccgcgggtatgaacagtatgcctacgatggcaaggattacctcgccctgaacgaggacctgcgctcctggaccgcagcggacactgcggctcagatctccaagcgcaagtgtgaggcggccaatgtggctgaacaaaggagagcctacctggagggcacgtgcgtggagtggctccacagatacctggagaacgggaaggagatgctgcagcgcgcggacccccccaagacacacgtgacccaccaccctgtctttgactatgaggccaccctgaggtgctgggccctgggcttctaccctgcggagatcatactgacctggcagcgggatggggaggaccagacccaggacgtggagctcgtggagaccaggcctgcaggggatggaaccttccagaagtgggcagctgtggtggtgccttctggagaggagcagagatacacgtgccatgtgcagcatgaggggctgccggagcccctcatgctgagatggaagcagtcttccctgcccaccatccccatcatgggtatcgttgctggcctggttgtccttgcagctgtagtcactggagctgcggtcgctgctgtgctgtggagaaagaagagctcagattgaaaaggagggagctactctcaggctgcagagaccagcccaccctgtgccaccatgaccctcttcctcatgctgaactgcattccttccccaatcacctttcctgttccagaaaaggggctgggatgtctccgtctctgtctcaaatttgtggtcactgagctataacttacttctgtattaaaattagaatctgagtataaatttactttttcaaattatttccaagagagattgatgggttaattaaaggagaagattcctgaaatttgagagacaaaataaatggaagacatgagaacttt

SEQ ID NO: 360 - DNA, 978 bp, Artificial Sequence
  Description of Artificial Sequence: Synthetic polynucleotide
gctttggggctccggctcctcagagagcctcggctaggtaggggagcgggactctggtgggagggvgggtgcggtgcdttggcgggggatgggtggctgvggbggccgtctgdccgvthgcgggggtygcctttccyagtgggacagtcgggaacatawygtttgttacgctggaaggggaagrggrggcgggaggcaggcgggagtgcggcccgccctgcggcaaccggagggggagggagaagggagcggaaacbctcgaawccggacggagccattgctcbcgcagaggggggcagcggaggagcgcttccggctvdcctctcttgtcgctgattggccgcttctcctcccgccgtcccgccgtgtgtgaaaacacaaatggcgtgttttggttggagtaaagctcctgtcagttacagcctcgggagtgcgcagcctcccaggaactctcgcattgccccctgggtgggtaggtaggtggggtggagagagctgcacaggcgggcgctgtcggcctcctgcggggggaggggagggtcagtgaaagtggctcccgcgcgggcgtcctgccaccctcccctccgggggagtcggtttacccgccgcctgctcggctttggtatctgattggctgctgaagtcctgggaacggccccttgttattggcttgggtcccaaatgagcgaaaccactacgcgagtcggcagggaggcggtctttggtacggccctccccgaggccagcgccgcagtgtctggcccctcgcccctgcgcaacgtggcaggaagcgcgcgcaggaggcgggggcgggctgccgggccgaggcttctgggtggtggtgactgcggctccgccctgggcgtccgccgcctgaaggacgagactagctctctacctgctctcggacccgtgggggtggggggtggaggaaggagtggggggtcggtcctgctggcttgtgggtgggaggcgcat

SEQ ID NO: 361 - DNA, 22 bp, Artificial Sequence
  Description of Artificial Sequence: Synthetic primer
gccttttgctggccttttgctc

SEQ ID NO: 362 - DNA, 600 bp, Artificial Sequence; identical to SEQ ID NO: 315
  Description of Artificial Sequence: Synthetic polynucleotide

SEQ ID NO: 363 - DNA, 28 bp, Artificial Sequence
  Description of Artificial Sequence: Synthetic primer
cgggccatttaccgtaagttatgtaacg

SEQ ID NO: 364 - DNA, 100 bp, Artificial Sequence; identical to SEQ ID NO: 317
  Description of Artificial Sequence: Synthetic polynucleotide

SEQ ID NO: 365 - DNA, 100 bp, Artificial Sequence; identical to SEQ ID NO: 317
  Description of Artificial Sequence: Synthetic polynucleotide

SEQ ID NO: 366 - DNA, 99 bp, Artificial Sequence; identical to SEQ ID NO: 319
  Description of Artificial Sequence: Synthetic oligonucleotide

SEQ ID NO: 367 - DNA, 27 bp, Artificial Sequence
  Description of Artificial Sequence: Synthetic primer
acaccggagaaaataatgaatgtcaag

SEQ ID NO: 368 - DNA, 27 bp, Artificial Sequence
  Description of Artificial Sequence: Synthetic primer
aaaacttgacattcattattttctccg

SEQ ID NO: 369 - DNA, 2918 bp, Artificial Sequence
  Description of Artificial Sequence: Synthetic polynucleotide
atgtaatgccctactttatcttttgttacattctttgtttatgagtattgctgatatgtggctagctgccacacttttcttgtcctttccatttgaaataaatatctttctatctccacccaaattaaagtactccgcaacctgttattccacccagcatcccttccctcttcaactacaatttcatgcagcgatcaagaaatacgaatgtaccgactgtttgccacttgtgtgggtgcattggggaaaagctgggtgggaagtggcagagcctagattataaaggaccagggtgagagttcccattgtggctcagctgaaatgaatctgactagcatccatgaggacgaaggtttgatccctggcctcaatcagtgggttaaggatctggcgttgctgtccgtgagttgtggtgtagttcgcagacaaggcgtggacttagtgtggctgtggctgtggcataggctagtggctacagctctgattcgacccctagcctgggaatctctatatgctgtgagtgtggccctaaaatttaaatgaaattaaataaaggaccagggtatatttttctttgaggataaggtacatagtcagtatatcagggacagtagacctaggaaacggatgcttcctctagtctgtgatgcgaggtggggcatctgagttgggggcggctggagcccttagggaccattaactaaacccgtcactctcccacatctcggtggaccttgggatcagtcaggatgcttcccctttgagcctcaaaatggccttagtatccttcccaacccagacggccctgtcagttcattgacttggctaatttgccagtgtaggcctatgcaaattaaggtagaacgcactccttagcgctcgttgactattcatcaacttttccttttagaaaagatattggtataagcacttcttaaaaaaccatattccactctgggtgtatttaatctaattttcccttctccttttcttttcccagatgtggccccttgtcgctgcccttcttttgggctctgcatgttgcggctccgcacagctccttttcaacaaaacgaagtcagttgagttcaccttctgtaatgataccgttgtgatcccttgttttgtcaccaacatggaagcccaaaatacgactgaggtctacgtcaagtggaaattcaaggggagggatatttatacgtttgatggtgctctgaataaatctacggttccgacggattttagttccgcaaagattgaagtgtctcagctgttgaagggtgacgcttccctgaaaatggataaatccgatgccgttagccatacggggaattacacctgcgaggttaccgaactcacccgcgagggggagacgataatagaacttaagtatagggtggttagctggttctctccaaacgagaacattctgatagttattttcccaatcttcgctatattgctgttctggggtcaattcggcattaaaacgcttaaatataggagcggcgggatggacgagaaaacgatcgccttgcttgtcgcaggtttggttatcaccgtcattgtgattgtcggagccatcctgtttgtccctggtgagtatagcttgaaaaatgccactggcctcggtctgatcgtgacgtccactggcatccttatactccttcattattatgtgttcagtactgccattggtcttacgtcttttgtgattgccatcctcgtcattcaggtcatcgcatacatactcgcagtcgtcggtttgagcctgtgcatcgcagcgtgcattcccatgcacggacctctcttgatctctggtctttctatattggcgctggcacaacttcttggcttggtttacatgaagtttgtcgcctctaatcagaagacgatccaacccccgcgcaacaactgatggttctgtcaatgctgcttgtctcaactgtaatggttgtgttttgggaatacatcaacaggtaattatgaaacatgatgaaatgatgttgatgaaagtctcctctaatctcctagttatcagccaagtcaccagcttgcattaaaagtaggattcactgacaccgtaaagaaagcattccagagagttgccgttgtggctcaggggcagcaaacccaattaggatccaagaggaggtgggtttgatccctggccttgctctttggcttaaggatccggcattgccgtgacctgtggtgtaggttgcagatgcagctcggatctggcattgctgtggctgtggcgtaggctggtggcttcagctccagtttgacccctagcctgggaacttccatatcccacacttgcggccctaaaaagcaaagaaagaaagaaaatattctacccttcctgtatccctgagcccttaaataccgtctttaaagtcattagatcttcaagtaccttccagctaattaattatcttccttcctgccatgttgccattgtcctgatttttatacctctgcagttctgggtaggctagagccagaaataataaggtcatgttaagaccaagatataatattaaattatttatatgaccagatatggaagttaccttgagaactttcagacaggaattccatgagaaatacaccctgatttttgcaatcctaaaatatttgcagagtttaaaggaacaactcaagttgttgacttttgctgcaaaacacactgagtcgctggtgattcatttgtgcctggctaaacttttgggtgttttgtcttttttttttaactctggaaagcaaaatgaattaaacatttctgagttttcaaattcatcagtggattcaccccaaatatttgacgctgcttctttgcttttggaaactacgatgccttggagattccagctggagacgcttctgacagaaagaaatgtctgcaagcagct

SEQ ID NO: 370 - DNA, 262 bp, Artificial Sequence
  Description of Artificial Sequence: Synthetic polynucleotide
ctctctttcatctctggtctttctatattggcgctggcacaacttcttggcttggtttacatgaagtttgtcgcctctaatcagaagacgatccaacccccgcgcaacaactgatggttctgtcaatgctgcttgtctcaactgtaatggttgtgttttgggaatacatcaacaggtaattatgaaacatgatgaaatgatgttgatgaaagtctcctctaatctcctagttatcagccaagtcaccagcttgattaaaagt

SEQ ID NO: 371 - DNA, 243 bp, Artificial Sequence
  Description of Artificial Sequence: Synthetic polynucleotide
agaaaagatattgggtataagcacttacttaaaaaaccatattccactcagggtgtatttaatctaattcttcccttctccttttcttttcccagatgtggccccttgtcgctgcccttcttttgggctctgcatgttgcggctccgcacagctccttttcaacaaaacgaagtcagttgagttcaccttctgtaatgataccgttgtgatcccttgttttgtcaccaacatggagcccaaaa

SEQ ID NO: 372 - DNA, 123 bp, Artificial Sequence
  Description of Artificial Sequence: Synthetic polynucleotide
gttgcagggggccccaaggcagaagatggcacggatgtgagcattcgggacctcttcagtgccaaagccaacaagggcccgagagtcacggtgcttctgggaaaggcgggcatgggcaagacc

SEQ ID NO: 373 - DNA, 15 bp, Artificial Sequence
  Description of Artificial Sequence: Synthetic primer
ggtcttgcccatgcc

SEQ ID NO: 374 - DNA, 123 bp, Artificial Sequence; identical to SEQ ID NO: 372
  Description of Artificial Sequence: Synthetic polynucleotide

SEQ ID NO: 375 - DNA, 123 bp, Artificial Sequence
  Description of Artificial Sequence: Synthetic polynucleotide
gttgcagggggccccaaggcagaagatggcacggatgtgagcattcgggacctcttcagtgccaaagccaacaagggcccgaaagtcacggtgcttctgggaaagggggggatgggcaagacc

SEQ ID NO: 376 - DNA, 135 bp, Artificial Sequence
  Description of Artificial Sequence: Synthetic polynucleotide
gttgcagggggccccaaggcagaagatggcacggatgtgagcattcgggacctcttcagtgccaaagccaacaagggcccgagaggcacgggggttctgggaaagggggggatggggaagaccccaaaatctatc

SEQ ID NO: 377 - DNA, 20 bp, Artificial Sequence
  Description of Artificial Sequence: Synthetic primer
gagaaaataatgaatgtcaa

SEQ ID NO: 378 - DNA, 20 bp, Artificial Sequence
  Description of Artificial Sequence: Synthetic primer
ttgacattcattattttctc

SEQ ID NO: 379 - DNA, 26 bp, Artificial Sequence
  Description of Artificial Sequence: Synthetic primer
acaccggggagagaagcagaggatgg

SEQ ID NO: 380 - DNA, 26 bp, Artificial Sequence
  Description of Artificial Sequence: Synthetic primer
aaaaccatcctctgcttctctccccg

SEQ ID NO: 381 - DNA, 26 bp, Artificial Sequence
  Description of Artificial Sequence: Synthetic primer
acaccgctgcttgtctcaactgtaag

SEQ ID NO: 382 - DNA, 26 bp, Artificial Sequence
  Description of Artificial Sequence: Synthetic primer
aaaacttacagttgagacaagcagcg

SEQ ID NO: 383 - DNA, 26 bp, Artificial Sequence
  Description of Artificial Sequence: Synthetic primer
acaccgaatacatcaacagcccagag

SEQ ID NO: 384 - DNA, 26 bp, Artificial Sequence
  Description of Artificial Sequence: Synthetic primer
aaaactctgggctgttgatgtattcg

SEQ ID NO: 385 - DNA, 26 bp, Artificial Sequence
  Description of Artificial Sequence: Synthetic primer
acaccgcccagaaggttctttgttcg

SEQ ID NO: 386 - DNA, 26 bp, Artificial Sequence
  Description of Artificial Sequence: Synthetic primer
aaaacgaacaaagaaccttctgggcg

SEQ ID NO: 387 - DNA, 26 bp, Artificial Sequence
  Description of Artificial Sequence: Synthetic primer
acaccgttggcagcagtgctcagagg

SEQ ID NO: 388 - DNA, 26 bp, Artificial Sequence
  Description of Artificial Sequence: Synthetic primer
aaaacctctgagcactgctgccaacg

SEQ ID NO: 389 - DNA, 26 bp, Artificial Sequence
  Description of Artificial Sequence: Synthetic primer
acaccgggggccgggagccgaggtgg

SEQ ID NO: 390 - DNA, 26 bp, Artificial Sequence
  Description of Artificial Sequence: Synthetic primer
aaaaccacctcggctcccggcccccg

SEQ ID NO: 391 - DNA, 26 bp, Artificial Sequence
  Description of Artificial Sequence: Synthetic primer
acaccgcacccagcttctgccgatcg

SEQ ID NO: 392 - DNA, 26 bp, Artificial Sequence
  Description of Artificial Sequence: Synthetic primer
aaaacgatcggcagaagctgggtgcg

SEQ ID NO: 393 - DNA, 26 bp, Artificial Sequence
  Description of Artificial Sequence: Synthetic primer
acaccgagagggggctgatcactgtg

SEQ ID NO: 394 - DNA, 26 bp, Artificial Sequence
  Description of Artificial Sequence: Synthetic primer
aaaacacagtgatcagccccctctcg

SEQ ID NO: 395 - DNA, 26 bp, Artificial Sequence
  Description of Artificial Sequence: Synthetic primer
acaccggcctcagaccccacacagag

SEQ ID NO: 396 - DNA, 26 bp, Artificial Sequence
  Description of Artificial Sequence: Synthetic primer
aaaactctgtgtggggtctgaggccg

SEQ ID NO: 397 - DNA, 26 bp, Artificial Sequence
  Description of Artificial Sequence: Synthetic primer
acaccgtactgctgctgagcacctgg

SEQ ID NO: 398 - DNA, 26 bp, Artificial Sequence
  Description of Artificial Sequence: Synthetic primer
aaaaccaggtgctcagcagcagtacg

SEQ ID NO: 399 - DNA, 26 bp, Artificial Sequence
  Description of Artificial Sequence: Synthetic primer
acaccgactgttgcagggggccccag

SEQ ID NO: 400 - DNA, 26 bp, Artificial Sequence
  Description of Artificial Sequence: Synthetic primer
aaaactggggccccctgcaacagtcg

SEQ ID NO: 401 - DNA, 26 bp, Artificial Sequence
  Description of Artificial Sequence: Synthetic primer
acaccgggggccccaaggcagaagag

SEQ ID NO: 402 - DNA, 26 bp, Artificial Sequence
  Description of Artificial Sequence: Synthetic primer
aaaactcttctgccttggggcccccg

SEQ ID NO: 403 - DNA, 26 bp, Artificial Sequence
  Description of Artificial Sequence: Synthetic primer
acaccgctcggttccattgcaagatg

SEQ ID NO: 404 - DNA, 26 bp, Artificial Sequence
  Description of Artificial Sequence: Synthetic primer
aaaacatcttgcaatggaaccgagcg

SEQ ID NO: 405 - DNA, 44 bp, Artificial Sequence; identical to SEQ ID NO: 241
  Description of Artificial Sequence: Synthetic primer

SEQ ID NO: 406 - DNA, 24 bp, Artificial Sequence
  Description of Artificial Sequence: Synthetic primer
ttccactctgggtgtatttaatct

SEQ ID NO: 407 - DNA, 20 bp, Artificial Sequence
  Description of Artificial Sequence: Synthetic primer
gctcagcctagggtttcaat

SEQ ID NO: 408 - DNA, 20 bp, Artificial Sequence
  Description of Artificial Sequence: Synthetic primer
agtttgggactgcctcattt

SEQ ID NO: 409 - DNA, 34 bp, Artificial Sequence; identical to SEQ ID NO: 249
  Description of Artificial Sequence: Synthetic primer

SEQ ID NO: 410 - DNA, 17 bp, Artificial Sequence
  Description of Artificial Sequence: Synthetic primer
gacccgctctgcacaaa

SEQ ID NO: 411 - DNA, 22 bp, Artificial Sequence
  Description of Artificial Sequence: Synthetic primer
ggagttacagggaatccgaatg

SEQ ID NO: 412 - DNA, 61 bp, Artificial Sequence; identical to SEQ ID NO: 255
  Description of Artificial Sequence: Synthetic primer

SEQ ID NO: 413 - DNA, 19 bp, Artificial Sequence
  Description of Artificial Sequence: Synthetic primer
ctgccaccgaacctacatc

SEQ ID NO: 414 - DNA, 45 bp, Artificial Sequence; identical to SEQ ID NO: 242
  Description of Artificial Sequence: Synthetic primer

SEQ ID NO: 415 - DNA, 20 bp, Artificial Sequence
  Description of Artificial Sequence: Synthetic primer
ccggatccttaagccaaaga

SEQ ID NO: 416 - DNA, 19 bp, Artificial Sequence
  Description of Artificial Sequence: Synthetic primer
atgagcaaggcaggaatgt

SEQ ID NO: 417 - DNA, 21 bp, Artificial Sequence
  Description of Artificial Sequence: Synthetic primer
ggagcagggaaacctgataaa

SEQ ID NO: 418 - DNA, 43 bp, Artificial Sequence; identical to SEQ ID NO: 250
  Description of Artificial Sequence: Synthetic primer

SEQ ID NO: 419 - DNA, 22 bp, Artificial Sequence
  Description of Artificial Sequence: Synthetic primer
cagaggtaacgacgagaacaaa

SEQ ID NO: 420 - DNA, 22 bp, Artificial Sequence
  Description of Artificial Sequence: Synthetic primer
catgaagccaagatctaggaag

SEQ ID NO: 421 - DNA, 57 bp, Artificial Sequence; identical to SEQ ID NO: 256
  Description of Artificial Sequence: Synthetic primer

SEQ ID NO: 422 - DNA, 17 bp, Artificial Sequence
  Description of Artificial Sequence: Synthetic primer
gtggtcttgcccatgcc

SEQ ID NO: 423 - DNA, 26 bp, Artificial Sequence
  Description of Artificial Sequence: Synthetic primer
acaccgtagaaaaggatgaagaaaag

SEQ ID NO: 424 - DNA, 26 bp, Artificial Sequence
  Description of Artificial Sequence: Synthetic primer
aaaacttttcttcatccttttctacg

SEQ ID NO: 425 - DNA, 26 bp, Artificial Sequence
  Description of Artificial Sequence: Synthetic primer
acaccgccaaatcttcaggagatctg

SEQ ID NO: 426 - DNA, 26 bp, Artificial Sequence
  Description of Artificial Sequence: Synthetic primer
aaaacagatctcctgaagatttggcg

SEQ ID NO: 427 - DNA, 26 bp, Artificial Sequence
  Description of Artificial Sequence: Synthetic primer
acaccgatctgggttctgaatcccag

SEQ ID NO: 428 - DNA, 26 bp, Artificial Sequence
  Description of Artificial Sequence: Synthetic primer
aaaactgggattcagaacccagatcg

SEQ ID NO: 429 - DNA, 26 bp, Artificial Sequence
  Description of Artificial Sequence: Synthetic primer
acaccggttctgaatcccacgggttg

SEQ ID NO: 430 - DNA, 26 bp, Artificial Sequence
  Description of Artificial Sequence: Synthetic primer
aaaacaacccgtgggattcagaaccg

SEQ ID NO: 431 - DNA, 22 bp, Artificial Sequence
  Description of Artificial Sequence: Synthetic primer
tgtcaagacgaactggttgtag

SEQ ID NO: 432 - DNA, 25 bp, Artificial Sequence
  Description of Artificial Sequence: Synthetic primer
gaagttagatgtaagcagcatgaag

SEQ ID NO: 433 - DNA, 22 bp, Artificial Sequence
  Description of Artificial Sequence: Synthetic primer
gtattggtcttcagccctcatc

SEQ ID NO: 434 - DNA, 22 bp, Artificial Sequence
  Description of Artificial Sequence: Synthetic primer
tgagttccttacgtggaatgtg

SEQ ID NO: 435 - DNA, 21 bp, Artificial Sequence
  Description of Artificial Sequence: Synthetic primer
agatggaggctcgtgtagtaa

SEQ ID NO: 436 - DNA, 21 bp, Artificial Sequence
  Description of Artificial Sequence: Synthetic primer
tcttcaggagatctgggttct

SEQ ID NO: 437 - DNA, 22 bp, Artificial Sequence
  Description of Artificial Sequence: Synthetic primer
aactaaatcctcctaacccgtg

SEQ ID NO: 438 - DNA, 26 bp, Artificial Sequence
  Description of Artificial Sequence: Synthetic primer
acaccgtcgatcctcaagatattgag

SEQ ID NO: 439 - DNA, 26 bp, Artificial Sequence
  Description of Artificial Sequence: Synthetic primer
aaaactcaatatcttgaggatcgacg

SEQ ID NO: 440 - DNA, 26 bp, Artificial Sequence
  Description of Artificial Sequence: Synthetic primer
acaccgtgcttttggtcctgagcgtg

SEQ ID NO: 441 - DNA, 26 bp, Artificial Sequence
  Description of Artificial Sequence: Synthetic primer
aaaacacgctcaggaccaaaagcacg

SEQ ID NO: 442 - DNA, 26 bp, Artificial Sequence
  Description of Artificial Sequence: Synthetic primer
acaccggcgctctttgggaacgtccg

SEQ ID NO: 443 - DNA, 26 bp, Artificial Sequence
  Description of Artificial Sequence: Synthetic primer
aaaacggacgttcccaaagagcgccg

SEQ ID NO: 444 - DNA, 26 bp, Artificial Sequence
  Description of Artificial Sequence: Synthetic primer
acaccgcaaggggatattcgggtttg

SEQ ID NO: 445 - DNA, 26 bp, Artificial Sequence
  Description of Artificial Sequence: Synthetic primer
aaaacaaacccgaatatccccttgcg

SEQ ID NO: 446 - DNA, 26 bp, Artificial Sequence
  Description of Artificial Sequence: Synthetic primer
acaccgacgacaatggtgtggcccag

SEQ ID NO: 447 - DNA, 26 bp, Artificial Sequence
  Description of Artificial Sequence: Synthetic primer
aaaactgggccagaccattgtcgtcg

SEQ ID NO: 448 - DNA, 22 bp, Artificial Sequence
  Description of Artificial Sequence: Synthetic primer
gagcagagctcactagaacttg

SEQ ID NO: 449 - DNA, 23 bp, Artificial Sequence
  Description of Artificial Sequence: Synthetic primer
aagagacaagcctcagactaaac

SEQ ID NO: 450 - DNA, 20 bp, Artificial Sequence
  Description of Artificial Sequence: Synthetic primer
agaagcagaggatgaggaga

SEQ ID NO: 451 - DNA, 21 bp, Artificial Sequence
  Description of Artificial Sequence: Synthetic primer
tggtaactgtgagtcccattg

SEQ ID NO: 452 - DNA, 21 bp, Artificial Sequence
  Description of Artificial Sequence: Synthetic primer
agagtggttctgtcaatgctg

SEQ ID NO: 453 - DNA, 22 bp, Artificial Sequence
  Description of Artificial Sequence: Synthetic primer
gcctatagcgtcttcttcttcg

SEQ ID NO: 454 - DNA, 110 bp, Artificial Sequence; identical to SEQ ID NO: 268
  Description of Artificial Sequence: Synthetic polynucleotide

SEQ ID NO: 455 - DNA, 26 bp, Artificial Sequence
  Description of Artificial Sequence: Synthetic primer
acaccgctgcttgtctcaactgtaag

SEQ ID NO: 456 - DNA, 26 bp, Artificial Sequence
  Description of Artificial Sequence: Synthetic primer
aaaacttacagttgagacaagcagcg

SEQ ID NO: 457 - DNA, 600 bp, Artificial Sequence
  Description of Artificial Sequence: Synthetic polynucleotide
cgtcaggggggcggagcctatggaaaaacgccagcaacgcggcctttttacggttcctggccttttgctggccttttgctcacatgtgagggcctatttcccatgattccttcatatttgcatatacgatacaaggctgttagagagataattggaattaatttgactgtaaacacaaagatattagtacaaaatacgtgacgtagaaagtaataatttcttgggtagtttgcagttttaaaattatgttttaaaatggactatcatatgcttaccgtaacttgaaagtatttcgatttcttggctttatatatcttgtggaaaggacgaaaacaccgctgcttgtctcaactgtaagtttttagagctagaaatagcaagttaaaataaggctagtccgttatcaacttgaaaaagtggcaccgagtcggtgcttttttgttttagagctagaaatagcaagttaaaataaggctagtccgtttttagcgcgtgcgccaattctgcagacaaatggctctagaggtacccgttacataacttacggtaaatggcccgcctggctgaccgcccaacgacccccgcccattgacgtcaata

SEQ ID NO: 458 - DNA, 22 bp, Artificial Sequence
  Description of Artificial Sequence: Synthetic primer
gccttttgctggccttttgctc

SEQ ID NO: 459 - DNA, 28 bp, Artificial Sequence
  Description of Artificial Sequence: Synthetic primer
cgggccatttaccgtaagttatgtaacg

SEQ ID NO: 460 - DNA, 99 bp, Artificial Sequence
  Description of Artificial Sequence: Synthetic oligonucleotide
tatcttgtggaaaggacgaaaacaccgctgcttgtctcaactgtaagtttttagagctagaaatagcaagttaaaataaggctagtccgttatcaactt

SEQ ID NO: 461 - DNA, 98 bp, Artificial Sequence
  Description of Artificial Sequence: Synthetic oligonucleotide
tatcttgtggaaaggacgaaacaccgctgcttgtctcaactgtaagtttttagagctagaaatagcaagttaaaataaggctagtccgttatcaactt

SEQ ID NO: 462 - DNA, 99 bp, Artificial Sequence; identical to SEQ ID NO: 460
  Description of Artificial Sequence: Synthetic oligonucleotide

SEQ ID NO: 463 - DNA, 22 bp, Artificial Sequence
  Description of Artificial Sequence: Synthetic primer
cttcgtgaaaccgctgtttatt

SEQ ID NO: 464 - DNA, 330 bp, Artificial Sequence
  Description of Artificial Sequence: Synthetic polynucleotide
cgctcctcttcgtgaaaccgctgtttattcttttgacaggagttggaacgcagcaccttcccttcctcccagccctgcctccttctgcagagcagagctcactagaacttgcttcgccttttactctggggggagagaagcagaggatgaggtacgtgaaacgttgaaatgatttgcctccgctttgctggggtcaccgggggggtgggtatcatgagctggctgcagcgtggagagaggagcccccctctccccctgacttcttgctgctccccccagttgttctgaaagaagacaaagtcctccagtccccggcatcggatctaggag

SEQ ID NO: 465 - DNA, 22 bp, Artificial Sequence
  Description of Artificial Sequence: Synthetic primer
gactggaggactttgtcttctt

SEQ ID NO: 466 - DNA, 22 bp, Artificial Sequence
  Description of Artificial Sequence: Synthetic primer
tgagttccttacgtggaatgtg

SEQ ID NO: 467 - DNA, 401 bp, Artificial Sequence
  Description of Artificial Sequence: Synthetic polynucleotide
tggtggtggtgtgcctgtgtctctgacacatctgcgatctcatgagttccttacgtggaatgtgaatagcgagatgaacagtattggtcttcagccctcatctctgcagatgttgcttgacccaaatgagcgttgccttttattttgattttgctttgatttgtctactccatgtacttgagccatgcatttctgtcttagcgatgctttttaaaagtcatttttttggttgattatccagatttgtccacctttgcttctagttgtagaaaaggatgaagaaaatggagttttgcttctagaactaaatcctcctaacccgtgggattcagaacccagatctcctgaagatttggcttttggggaagtgcaggtaaggaaatgtttaaattataatattc

SEQ ID NO: 468 - DNA, 21 bp, Artificial Sequence
  Description of Artificial Sequence: Synthetic primer
tcttcaggagatctgggttct

SEQ ID NO: 469 - DNA, 20 bp, Artificial Sequence
  Description of Artificial Sequence: Synthetic primer
ctgctctgcaaacactcaga

SEQ ID NO: 470 - DNA, 282 bp, Artificial Sequence
  Description of Artificial Sequence: Synthetic polynucleotide
accaagaacctgtggggatggctcgtgaggctgctctgcaaacactcagaatggctgagtgccaaggtgaagttcttcctccccaacatggacctgggtgccaggaacgaggcctcagaccccacacagagggtcgtcctacaactcagaaaactgcgtacccagagtcagatcacctggcaggcgttcatccactgtgtgtgcatggagctggacgtgccgctggacctggaggtactgctgctgagcacctggggccacggagaagggctccccagtcag

SEQ ID NO: 471 - DNA, 18 bp, Artificial Sequence
  Description of Artificial Sequence: Synthetic primer
tcagcagcagtacctcca

SEQ ID NO: 472 - DNA, 125 bp, Artificial Sequence
  Description of Artificial Sequence: Synthetic polynucleotide
cccttctccttttcttttcccaggagaaaataatgaatgtcaaaggaagagtggttctgtcaatgctgcttgtctcaactgtaatggttgtgttttgggaatacatcaacaggtaattatgaaac

SEQ ID NO: 473 - DNA, 125 bp, Artificial Sequence; identical to SEQ ID NO: 472
  Description of Artificial Sequence: Synthetic polynucleotide

SEQ ID NO: 474 - DNA, 111 bp, Artificial Sequence
  Description of Artificial Sequence: Synthetic polynucleotide
ttctttccaggagaaataatgaatgtcaaaggaagagtggttctgtcaatgctgcttgtctcaactgtaatggttgtgttttgggaatacatcaacaggtaattatgaaac

SEQ ID NO: 475 - DNA, 115 bp, Artificial Sequence
  Description of Artificial Sequence: Synthetic polynucleotide
tctcttttctttccaggagaataatgaatgtcaaaggaagagtggttctgtcaatgctgcttgtctcaactgaaagggtttggtttgggaattccttcaccgggaattttgaaac

SEQ ID NO: 476 - DNA, 110 bp, Artificial Sequence
  Description of Artificial Sequence: Synthetic polynucleotide
tcttttcaggagaaataatgaatgtcaaaggaagagtggttctgtcaatgctgcttgtctcaactgtaagggttgtgttttgggaatacatcaacaggtaattatgaaac

SEQ ID NO: 477 - DNA, 114 bp, Artificial Sequence
  Description of Artificial Sequence: Synthetic polynucleotide
cttttctttccaggagaaataatgaatgtcaaaggaagagtggttctgtcaatgctgcttgtctcaactgtaatggttgtgttttgggaatacatcaacaggtaattatgaaac

SEQ ID NO: 478 - DNA, 80 bp, Artificial Sequence
  Description of Artificial Sequence: Synthetic oligonucleotide
tttcaggagaataatgaatgtcaaaggaagagtggttctgtcaatgctgcttgtctcaactgatggggggtgttttggga

SEQ ID NO: 479 - DNA, 19 bp, Artificial Sequence
  Description of Artificial Sequence: Synthetic primer
ctgccaccgaacctacatc

SEQ ID NO: 480 - DNA, 135 bp, Artificial Sequence
  Description of Artificial Sequence: Synthetic polynucleotide
cggtcgcctgccaccgaacctacatcccgcccatcttgcaatggaaccgagcctctgtgcccttcgacactcaggaggggactgttgcagggggccccaaggcagaagatggcacggatgtgagcattcgggacc

SEQ ID NO: 481 - DNA, 135 bp, Artificial Sequence; identical to SEQ ID NO: 480
  Description of Artificial Sequence: Synthetic polynucleotide

SEQ ID NO: 482 - DNA, 82 bp, Artificial Sequence
  Description of Artificial Sequence: Synthetic oligonucleotide
ctctgtgccttcgacactcaggaggggactgttgctcggggccccaaggcacaagatggcacggatgtgagcattcgggacc

SEQ ID NO: 483 - DNA, 89 bp, Artificial Sequence
  Description of Artificial Sequence: Synthetic oligonucleotide
acgagcctctgtgcccttcgacactcaggaggggactgttgcagggggccccaaggcagaagatggcacggatgtgagcattcgggacc

SEQ ID NO: 484 - DNA, 86 bp, Artificial Sequence
  Description of Artificial Sequence: Synthetic oligonucleotide
gagcctctgtgccttcgacactcaggaggggactgttgcagggggccccaaggcagaagatggcacggatgtgagcattcgggacc

SEQ ID NO: 485 - DNA, 81 bp, Artificial Sequence
  Description of Artificial Sequence: Synthetic oligonucleotide
tctgtgccttcgacactcaggaggggactgttgcagggggccccaaggcagaagatggcacggatgtgagcattcgggacc

SEQ ID NO: 486 - DNA, 81 bp, Artificial Sequence; identical to SEQ ID NO: 485
  Description of Artificial Sequence: Synthetic oligonucleotide

SEQ ID NO: 487 - protein, 100 aa, Artificial Sequence
  Description of Artificial Sequence: Synthetic polypeptide
EPPTACREKQYLINSQCCSLCQPGQKLVSDCTEFTETECLPCGESEFLDTWNRETHCHQHKYCDPNLGLRVQQKGTSETDTICTCEEGWHCTSEACESCV

SEQ ID NO: 488 - protein, 33 aa, Artificial Sequence
  Description of Artificial Sequence: Synthetic polypeptide
EKQYLINSQCCSLCQPGQKLVSDCTEFTETECL

SEQ ID NO: 489-498 - skipped (10 entries)

SEQ ID NO: 499 - DNA, 2580 bp, Artificial Sequence
  Description of Artificial Sequence: Synthetic polynucleotide
caagtaaaaggtaaacgtggagtaggcagttcccaggctaggggttgaataggcgtggggggaggggaagagtcctgacccagggaagacattaaaaaggtagtggggtcgactagatgaaggagagcctttctctctgggcaagagcggtgcaatggtgtgtaaaggtagctgagaagacgaaaagggcaagcatcttcctgctaccaggctggggaggcccaggcccacgaccccgaggagagggaacgcagggagactgaggtgacccttctttcccccggggcccggtcgtgtggttcggtgtctcttttctgttggacccttaccttgacccaggcgctgccggggcctgggacccagggccagctcgccgccaatcagcagtgtggtactttgtcttgaggagatgtcctggactcacacggaaacttagggctacggaatgaagttctcactcccattaggtgacaggtttttagagaagccaatcagcgtcgccgcggtcctggttctaaagtcctcgctcacccacccggactcattctccccagacgccaaggatggtggtcatggcgccccgaaccctcttcctgctgctctcgggggccctgaccctgaccgagacctgggcgggctcccactccatgaggtatttcagcgccgccgtgtcccggcccggccgcggggagccccgcttcatcgccatgggctacgtggacgacacgcagttcgtgcggttcgacagcgactcggcgtgtccgaggatggagccgcgggcgccgtgggtggagcaggaggggccggagtattgggaagaggagacacggaacaccaaggcccacgcacagactgacagaatgaacctgcagaccctgcgcggctactacaaccagagcgaggccagttctcacaccctccagtggatgattggctgcgacctggggtccgacggacgcctcctccgcgggtatgaacagtatgcctacgatggcaaggattacctcgccctgaacgaggacctgcgctcctggaccgcagcggacactgcggctcagatctccaagcgcaagtgtgaggcggccaatgtggctgaacaaaggagagcctacctggagggcacgtgcgtggagtggctccacagatacctggagaacgggaaggagatgctgcagcgcgcggacccccccaagacacacgtgacccaccaccctgtctttgactatgaggccaccctgaggtgctgggccctgggcttctaccctgcggagatcatactgacctggcagcgggatggggaggaccagacccaggacgtggagctcgtggagaccaggcctgcaggggatggaaccttccagaagtgggcagctgtggtggtgccttctggagaggagcagagatacacgtgccatgtgcagcatgaggggctgccggagcccctcatgctgagatggaagcagtcttccctgcccaccatccccatcatgggtatcgttgctggcctggttgtccttgcagctgtagtcactggagctgcggtcgctgctgtgctgtggagaaagaagagctcagattgaaaaggagggagctactctcaggctgcagagaccagcccaccctgtgccaccatgaccctcttcctcatgctgaactgcattccttccccaatcacctttcctgttccagaaaaggggctgggatgtctccgtctctgtctcaaatttgtggtcactgagctataacttacttctgtattaaaattagaatctgagtataaatttactttttcaaattatttccaagagagattgatgggttaattaaaggagaagattcctgaaatttgagagacaaaataaatggaagacatgagaactttcaccctgcagttggaaagggaactatttcggctttggggctccggctcctcagagagcctcggctaggtaggggagcgggactctggtttgggggagggccggcggtttggcgggggatgggtgcttgaggtggtctgaccggtagcgggggtcgccttccctagcgggaagtcgggagcatatcgtttgttacgctggaaggggaagaggtggtgagaggcaggcgggagtgcggcccgccctgcggcaaccggagggggagggagaagggagcggaaaagcctggaatacggacggagccattgctcccgcagagggaggggaggagcgcttcctgctcttctcttgtcactgattggccgcttctcctcccgccgtgtgtgaaaacacaaatggcgtgttttggttggagtaaagctcctgtcagttacagcctcgggagtgcgcagcctcccaggaactctcgcattgccccctgggtgggtaggtaggtggggtggagagagctgcacaggcgggcgctgtcggcctcctgcggggggaggggagggtcagtgaaagtggctcccgcgcgggcgtcctgccaccctcccctccgggggagtcggtttacccgccgcctgctcggctttggtatctgattggctgctgaagtcctgggaacggccccttgttattggcttgggtcccaaatgag

SEQ ID NO: 500 - DNA, 3497 bp, Artificial Sequence
  Description of Artificial Sequence: Synthetic polynucleotide
aatgtctttggtgtgggaargaagcagccatctgagataggaasccdgaaaacgagaggaaaggcgtccaggaagattcttabggaggggagatcgvggcccccacgagcgaccagattgtctgtcacaaggccgcgagaacgggggtggggggtggggghtcggggagagaaaaaaawgtgtgctgtgtattttgagmggagggcrgcgagaggcctvtcctcaadkaaaaggyaaacgtggagtaggcagttcccaggaaaaggggtgaagaggcgtdgggggaggggaagcgtccctgacccaggaaagacatgaaaagggtagtggggtcgactagattaagaggggggcctctctccctgggaaagaggggtgttgcaatggtgtgtrcaaggbggcgaggggggatgagaaggggcagcatcctcctgctaagagcctggggagggccaggcccacgacccmgaggagagcgagcgvgggagacggaggaggtgacccttccctcccccggggccggtcgtgaggttcggtctctcttttctgtcggacccttaccttgtcccaggcgctgccgggcctgggcccgggctgcggcgcacggcactcccgggaggcagcaggactcgacttaggcccaacgcggcgccacggcgtttcctggccggaatggcccgtacccgtgaggtgggggtggggggcagaaaaggcggagcgagcaaaggcggggagggggggcagggccagggaaggagggggggggccggcactactgtgttggcggactggcgggactggggctgcgtgagtctctgagcgcaggcgggcggcggccgcccctcccccgcagcggcggcggccagcgccggcgccaggggcacccgggacacgccccctcccgccgcgccattggcctctccgcccaccgccccgcacccattggccvgctcgccgccaatcagcggaagccgccggggccgcctagagaagaggctgtagtgtggtactttgtcttgaggagatgtcctggactcacacggaaacttagggctacggaatgaagttctcactcccattaggtgacaggtttttagagaagccaatcagcgtcgccgcggtcctggttctaaagtcctcgctcacccacccggactcattctccccagacgccaaggatggtggtcatggcgccccgaaccctcttcctgctgctctcgggggccctgaccctgaccgagacctgggcgggctcccactccatgaggtatttcagcgccgccgtgtcccggcccggccgcggggagccccgcttcatcgccatgggctacgtggacgacacgcagttcgtgcggttcgacagcgactcggcgtgtccgaggatggagccgcgggcgccgtgggtggagcaggaggggccggagtattgggaagaggagacacggaacaccaaggcccacgcacagactgacagaatgaacctgcagaccctgcgcggctactacaaccagagcgaggccagttctcacaccctccagtggatgattggctgcgacctggggtccgacggacgcctcctccgcgggtatgaacagtatgcctacgatggcaaggattacctcgccctgaacgaggacctgcgctcctggaccgcagcggacactgcggctcagatctccaagcgcaagtgtgaggcggccaatgtggctgaacaaaggagagcctacctggagggcacgtgcgtggagtggctccacagatacctggagaacgggaaggagatgctgcagcgcgcggacccccccaagacacacgtgacccaccaccctgtctttgactatgaggccaccctgaggtgctgggccctgggcttctaccctgcggagatcatactgacctggcagcgggatggggaggaccagacccaggacgtggagctcgtggagaccaggcctgcaggggatggaaccttccagaagtgggcagctgtggtggtgccttctggagaggagcagagatacacgtgccatgtgcagcatgaggggctgccggagcccctcatgctgagatggaagcagtcttccctgcccaccatccccatcatgggtatcgttgctggcctggttgtccttgcagctgtagtcactggagctgcggtcgctgctgtgctgtggagaaagaagagctcagattgaaaaggagggagctactctcaggctgcagagaccagcccaccctgtgccaccatgaccctcttcctcatgctgaactgcattccttccccaatcacctttcctgttccagaaaaggggctgggatgtctccgtctctgtctcaaatttgtggtcactgagctataacttacttctgtattaaaattagaatctgagtataaatttactttttcaaattatttccaagagagattgatgggttaattaaaggagaagattcctgaaatttgagagacaaaataaatggaagacatgagaactttgctttggggctccggctcctcagagagcctcggctaggtaggggagcgggactctggtgggagggvgggtgcggtgcdttggcgggggatgggtggctgvggbggccgtctgdccgvthgcgggggtygcctttccyagtgggacagtcgggaacatawygtttgttacgctggaaggggaagrggrggcgggaggcaggcgggagtgcggcccgccctgcggcaaccggagggggagggagaagggagcggaaacbctcgaawccggacggagccattgctcbcgcagaggggggcagcggaggagcgcttccggctvdcctctcttgtcgctgattggccgcttctcctcccgccgtcccgccgtgtgtgaaaacacaaatggcgtgttttggttggagtaaagctcctgtcagttacagcctcgggagtgcgcagcctcccaggaactctcgcattgccccctgggtgggtaggtaggtggggtggagagagctgcacaggcgggcgctgtcggcctcctgcggggggaggggagggtcagtgaaagtggctcccgcgcgggcgtcctgccaccctcccctccgggggagtcggtttacccgccgcctgctcggctttggtatctgattggctgctgaagtcctgggaacggccccttgttattggcttgggtcccaaatgagcgaaaccactacgcgagtcggcagggaggcggtctttggtacggccctccccgaggccagcgccgcagtgtctggcccctcgcccctgcgcaacgtggcaggaagcgcgcgcaggaggcgggggcgggctgccgggccgaggcttctgggtggtggtgactgcggctccgccctgggcgtccgccgcctgaaggacgagactagctctctacctgctctcggacccgtgggggtggggggtggaggaaggagtggggggtcggtcctgctggcttgtgggtgggaggcgcatgttctccaaaaacccgcgcgag

SEQ ID NO: 501 - DNA, 966 bp, Artificial Sequence
  Description of Artificial Sequence: Synthetic polynucleotide
aatgtctttggtgtgggaaaggaagcagccatctgagataggaaccctgaaaacgagaggaaaggcgtccaggaagattcttggggaggggagatcgaggcccccacgagcgaccagattgtctgtcacaaggccgcgagaacgggggtggggggtgggggttcggggagagaaaaaaaagtgtgctgtgtattttgaggggagggcggcgagaggcctatcctcaagtaaaaggtaaacgtggagtaggcagttcccaggaaaaggggtgaagaggcgtggggggaggggaagcgtccctgacccaggaaagacatgaaaagggtagtggggtcgactagattaagaggggggcctctctccctgggaaagaggggtgttgcaatggtgtgtcaagggggcgaggggggatgagaaggggcagcatcctcctgctaagagcctggggagggccaggcccacgaccccgaggagagcgagcgcgggagacggaggaggtgacccttccctcccccggggccggtcgtgaggttcggtctctcttttctgtcggacccttaccttgtcccaggcgctgccgggcctgggcccgggctgcggcgcacggcactcccgggaggcagcaggactcgacttaggcccaacgcggcgccacggcgtttcctggccggaatggcccgtacccgtgaggtgggggtggggggcagaaaaggcggagcgagcaaaggcggggagggggggcagggccagggaaggagggggggggccggcactactgtgttggcggactggcgggactggggctgcgtgagtctctgagcgcaggcgggcggcggccgcccctcccccgcagcggcggcggccagcgccggcgccaggggcacccgggacacgccccctcccgccgcgccattggcctctccgcccaccgccccgcacccattggccagctcgccgccaatcagc

SEQ ID NO: 502 - DNA, 1522 bp, Artificial Sequence
  Description of Artificial Sequence: Synthetic polynucleotide
agtgtggtactttgtcttgaggagatgtcctggactcacacggaaacttagggctacggaatgaagttctcactcccattaggtgacaggtttttagagaagccaatcagcgtcgccgcggtcctggttctaaagtcctcgctcacccacccggactcattctccccagacgccaaggatggtggtcatggcgccccgaaccctcttcctgctgctctcgggggccctgaccctgaccgagacctgggcgggctcccactccatgaggtatttcagcgccgccgtgtccagacctgggagaggagagccccgcttcatcgccatgggctacgtggacgacacgcagttcgtgcggttcgacagcgactcggcgtgtccgaggatggagccgcgggcgccgtgggtggagcaggaggggccggagtattgggaagaggagacacggaacaccaaggcccacgcacagactgacagaatgaacctgcagaccctgcgcggctactacaaccagagcgaggccagttctcacaccctccagtggatgattggctgcgacctggggtccgacggacgcctcctccgcgggtatgaacagtatgcctacgatggcaaggattacctcgccctgaacgaggacctgcgctcctggaccgcagcggacactgcggctcagatctccaagcgcaagtgtgaggcggccaatgtggctgaacaaaggagagcctacctggagggcacgtgcgtggagtggctccacagatacctggagaacgggaaggagatgctgcagcgcgcggacccccccaagacacacgtgacccaccaccctgtctttgactatgaggccaccctgaggtgctgggccctgggcttctaccctgcggagatcatactgacctggcagcgggatggggaggaccagacccaggacgtggagctcgtggagaccaggcctgcaggggatggaaccttccagaagtgggcagctgtggtggtgccttctggagaggagcagagatacacgtgccatgtgcagcatgaggggctgccggagcccctcatgctgagatggaagcagtcttccctgcccaccatccccatcatgggtatcgttgctggcctggttgtccttgcagctgtagtcactggagctgcggtcgctgctgtgctgtggagaaagaagagctcagattgaaaaggagggagctactctcaggctgcagagaccagcccaccctgtgccaccatgaccctcttcctcatgctgaactgcattccttccccaatcacctttcctgttccagaaaaggggctgggatgtctccgtctctgtctcaaatttgtggtcactgagctataacttacttctgtattaaaattagaatctgagtataaatttactttttcaaattatttccaagagagattgatgggttaattaaaggagaagattcctgaaatttgagagacaaaataaatggaagacatgagaactttcaccctgcagttggaaagggaacta

SEQ ID NO: 503 - DNA, 978 bp, Artificial Sequence; identical to SEQ ID NO: 360
  Description of Artificial Sequence: Synthetic polynucleotide

SEQ ID NO: 504 - DNA, 23 bp, Artificial Sequence
  Description of Artificial Sequence: Synthetic oligonucleotide
gaggtactgctgctgagcacctg

SEQ ID NO: 505 - skipped

SEQ ID NO: 506 - DNA, 23 bp, Artificial Sequence
  Description of Artificial Sequence: Synthetic oligonucleotide
gaggtactgctgctgagcacctg

SEQ ID NO: 507 - DNA, 16 bp, Artificial Sequence
  Description of Artificial Sequence: Synthetic oligonucleotide
gaggtactgctgctga

SEQ ID NO: 508 - DNA, 16 bp, Artificial Sequence
  Description of Artificial Sequence: Synthetic oligonucleotide
gaggtactgctgctga

SEQ ID NO: 509 - DNA, 16 bp, Artificial Sequence
  Description of Artificial Sequence: Synthetic oligonucleotide
gaggtactgctgctga

SEQ ID NO: 510 - DNA, 16 bp, Artificial Sequence
  Description of Artificial Sequence: Synthetic oligonucleotide
gaggtactgctgctga

SEQ ID NO: 511 - DNA, 16 bp, Artificial Sequence
  Description of Artificial Sequence: Synthetic oligonucleotide
gaggtactgctgctga

SEQ ID NO: 512 - DNA, 85 bp, Artificial Sequence
  Description of Artificial Sequence: Synthetic oligonucleotide
agatcacctggcaggcgttcatccactgtgtgtgcatggagctggacgtgccgctggacctggaggtactgctgctgaaaatggt
